(19) United States
(12) Patent Application Publication
(10) Pub. No.: US 2024/0025973 A1
(43) Pub. Date: Jan. 25, 2024

(54) PVRIG POLYPEPTIDES AND METHODS OF TREATMENT

(71) Applicant: Compugen Ltd., Holon (IL)

(72) Inventors: Mark White, Antioch, CA (US); Sandeep Kumar, San Bruno, CA (US); Christopher Chan, South San Francisco, CA (US); Spencer Liang, San Mateo, CA (US); Lance Stapleton, Oakland, CA (US); Andrew W. Drake, Mountain View, CA (US); Yosi Gozlan, Tel Aviv (IL); Ilan Vaknin, Tel Aviv (IL); Shirley Sameah-Greenwald, Kfar Saba (IL); Liat Dassa, Tel Aviv (IL); Zohar Tiran, Oranit (IL); Gad S. Cojocaru, Tel Aviv (IL); Amir Toporik, Binyamina (IL); Yossef Kliger, Rishon Le Zion (IL); Ofer Levy, Moshav Mesilat Zion Doar Na Shimson (IL); Arthur Machlenkin, Tel Aviv (IL); Sergey Nemzer, Ranaana (IL); Yair Benita, Tel Aviv (IL); Amit Novik, Binyamina (IL)

(21) Appl. No.: 18/460,523

(22) Filed: Sep. 1, 2023

Related U.S. Application Data
(63) Continuation of application No. 16/775,133, filed on Jan. 28, 2020, now Pat. No. 11,795,209.
Application No. 16/775,133 is a continuation of application No. 15/048,975, filed on Feb. 19, 2016, now Pat. No. 10,550,173.
(60) Provisional application No. 62/141,168, filed on Mar. 31, 2015.
(60) Provisional application No. 62/118,235, filed on Feb. 19, 2015.

(51) Int. Cl. C07K 16/10; G01N 33/574; G01N 33/50; C12N 15/113; C07K 16/28; C07K 7/06; C07K 14/705

(52) U.S. Cl. CPC C07K 16/1009; G01N 33/574; G01N 33/5011; C12N 15/1138; C07K 16/2818; C07K 7/06; C07K 16/2803; C07K 14/70503; G01N 33/502; G01N 33/505; C12N 2310/14; C07K 2317/74; G01N 2500/02; A61K 2039/507

(57) ABSTRACT

The present invention is directed to PVRIG polypeptides and their uses.

### CROSS REFERENCE TO RELATED APPLICATIONS

[0001] This application is a continuation of U.S. application Ser. No. 16/775,133, filed Jan. 28, 2020, which is a continuation of U.S. application Ser. No. 15/048,975, filed Feb. 19, 2016 (now U.S. Pat. No. 10,550,173) which claims priority under 35 U.S.C. § 119 to U.S. Ser. No. 62/118,235, filed Feb. 19, 2015, and to U.S. Ser. No. 62/141,168, filed Mar. 31, 2015, both of which are expressly incorporated herein by reference in their entirety.

### SEQUENCE LISTING

[0002] The instant application contains a Sequence Listing which has been submitted electronically in XML format and is hereby incorporated by reference in its entirety. Said XML copy, created on Sep. 1, 2023, is named 114386-5003-US02_SL.xml and is 1,884,000 bytes in size.

### BACKGROUND OF THE INVENTION

[0003] Naïve T cells must receive two independent signals from antigen-presenting cells (APC) in order to become productively activated. The first, Signal 1, is antigen-specific and occurs when T cell antigen receptors encounter the appropriate antigen-MHC complex on the APC. The fate of the immune response is determined by a second, antigen-independent signal (Signal 2) which is delivered through a T cell costimulatory molecule that engages its APC-expressed ligand. This second signal could be either stimulatory (positive costimulation) or inhibitory (negative costimulation or coinhibition). In the absence of a costimulatory signal, or in the presence of a coinhibitory signal, T-cell activation is impaired or aborted, which may lead to a state of antigen-specific unresponsiveness (known as T-cell anergy), or may result in T-cell apoptotic death.

[0004] Costimulatory molecule pairs usually consist of ligands expressed on APCs and their cognate receptors expressed on T cells. The prototype ligand/receptor pairs of costimulatory molecules are B7/CD28 and CD40/CD40L. The B7 family consists of structurally related, cell-surface protein ligands, which may provide stimulatory or inhibitory input to an immune response. Members of the B7 family are structurally related, with the extracellular domain containing at least one variable or constant immunoglobulin domain.

[0005] Both positive and negative costimulatory signals play critical roles in the regulation of cell-mediated immune responses, and molecules that mediate these signals have proven to be effective targets for immunomodulation. Based on this knowledge, several therapeutic approaches that involve targeting of costimulatory molecules have been developed, and were shown to be useful for prevention and treatment of cancer by turning on, or preventing the turning off, of immune responses in cancer patients and for prevention and treatment of autoimmune diseases and inflammatory diseases, as well as rejection of allogenic transplantation, each by turning off uncontrolled immune responses, or by induction of “off signal” by negative costimulation (or coinhibition) in subjects with these pathological conditions.

[0006] Manipulation of the signals delivered by B7 ligands has shown potential in the treatment of autoimmunity, inflammatory diseases, and transplant rejection. Therapeutic strategies include blocking of costimulation using monoclonal antibodies to the ligand or to the receptor of a costimulatory pair, or using soluble fusion proteins composed of the costimulatory receptor that may bind and block its appropriate ligand. Another approach is induction of co-inhibition using soluble fusion protein of an inhibitory ligand. These approaches rely, at least partially, on the eventual deletion of auto- or allo-reactive T cells (which are responsible for the pathogenic processes in autoimmune diseases or transplantation, respectively), presumably because in the absence of costimulation (which induces cell survival genes) T cells become highly susceptible to induction of apoptosis. Thus, novel agents that are capable of modulating costimulatory signals, without compromising the immune system's ability to defend against pathogens, are highly advantageous for treatment and prevention of such pathological conditions.

[0007] Costimulatory pathways play an important role in tumor development. Interestingly, tumors have been shown to evade immune destruction by impeding T cell activation through inhibition of co-stimulatory factors in the B7-CD28 and TNF families, as well as by attracting regulatory T cells, which inhibit anti-tumor T cell responses (see Wang (2006), “Immune Suppression by Tumor Specific CD4⁺ Regulatory T cells in Cancer”, Semin. Cancer. Biol. 16:73-79; Greenwald, et al. (2005), “The B7 Family Revisited”, Ann. Rev. Immunol. 23:515-48; Watts (2005), “TNF/TNFR Family Members in Co-stimulation of T Cell Responses”, Ann. Rev. Immunol. 23:23-68; Sadum, et al., (2007) “Immune Signatures of Murine and Human Cancers Reveal Unique Mechanisms of Tumor Escape and New Targets for Cancer Immunotherapy”, Clin. Canc. Res. 13(13): 4016-4025). Such tumor expressed co-stimulatory molecules have become attractive cancer biomarkers and may serve as tumor-associated antigens (TAAs). Furthermore, costimulatory pathways have been identified as immunologic checkpoints that attenuate T cell dependent immune responses, both at the level of initiation and effector function within tumor metastases. As engineered cancer vaccines continue to improve, it is becoming clear that such immunologic checkpoints are a major barrier to the vaccines' ability to induce therapeutic anti-tumor responses. In that regard, costimulatory molecules can serve as adjuvants for active (vaccination) and passive (antibody-mediated) cancer immunotherapy, providing strategies to thwart immune tolerance and stimulate the immune system.

[0008] Over the past decade, agonists and/or antagonists to various costimulatory proteins have been developed for treating autoimmune diseases, graft rejection, allergy and cancer. For example, CTLA4-Ig (Abatacept, Orencia®) is approved for treatment of RA, mutated CTLA4-Ig (Belatacept, Nulojix®) for prevention of acute kidney transplant rejection and by the anti-CTLA4 antibody (Ipilimumab, Yervoy®), recently approved for the treatment of melanoma.

[0009] Accordingly, there is a need for additional agonists and antagonists of immune checkpoint pathways.

### BRIEF SUMMARY OF THE INVENTION

[0010] The present invention provides methods of screening for inhibitors of the binding association of PVRIG polypeptide with PVLR2, the method comprising: a) providing a surface comprising a first ligand protein comprising one of PVRIG polypeptide or PVLR2 polypeptide; b) contacting said surface with a candidate agent under physiological conditions, wherein if said candidate agent binds to said first ligand protein it forms a first binding complex; c) contacting said surface with a second ligand protein comprising the other of PVRIG polypeptide or PVLR2; and d) determining whether said PVRIG polypeptide and said PVLR2 are bound as an indication of whether said candidate agent inhibits said binding association.

[0011] In a further aspect, the present invention provides methods of screening for inhibitors of the binding association of PVRIG polypeptide with PVLR2, said method comprising: a) providing a cell comprising an exogeneous recombinant nucleic acid encoding a human PVRIG polypeptide, wherein said cell expresses said human PVRIG polypeptide; b) contacting said cell with a candidate agent and a labeled PVRL2 polypeptide; c) determining whether said PVRIG polypeptide binds to PVLR2 as an indication of whether said candidate agent inhibits the binding of PVRIG polypeptide with PVLR2.

[0012] In an additional aspect, the present invention provides methods of screening for inhibitors of the binding association of PVRIG polypeptide with PVLR2, said method comprising: a) providing a cell comprising an exogeneous recombinant nucleic acid encoding a human PVLR2 polypeptide, wherein said cell expresses said human PVLR2 polypeptide; b) contacting said cell with a candidate agent and a labeled PVRIG polypeptide; c) determining whether said PVLR2 polypeptide binds to PVRIG as an indication of whether said candidate agent inhibits the binding of PVRIG polypeptide with PVLR2.

[0013] In a further aspect, the invention provides methods of screening for inhibitors of the binding association of PVRIG polypeptide with PVLR2, said method comprising: a) providing a test solution comprising: i) a PVRIG polypeptide comprising a first FRET label; ii) a PVLR2 polypeptide comprising a second FRET label; c) providing a candidate agent; and d) detecting a FRET signal between said first and second label, wherein a difference in said FRET signal in the presence or absence of said candidate agent indicates that the candidate agent inhibits said binding association.

[0014] In an additional aspect, the invention provides methods as above wherein a plurality and/or a library of candidate agents are tested. The candidate agents can be proteins, including anti-PVRIG antibodies and/or proteins comprising a wild type or variant extracellular domain (ECD) of PVRIG. In some methods the proteins are fusion proteins comprising the ECD and a fusion partner, and the fusion partner can be a human IgG Fc domain or a human serum albumin (HSA).

[0015] In a further aspect, the methods above can further comprise contacting a candidate agent that has the first activity with a population of cytotoxic T cells (CTLs) under conditions wherein said CTLs would normally be activated; and b) determining the effect of said agent on said activation.

[0016] In a further aspect, the methods above can further comprise contacting a candidate agent that has the first activity with a population of cytotoxic T cells (CTLs); and b) determining the effect of said agent on IFNγ production.

[0017] In an addition aspect, the methods above can further comprise contacting the candidate agent with a population of γδ T cells under conditions wherein said γδ T cells would normally be activated; and b) determining the effect of said agent on said activation.

[0018] In a further aspect, the methods above can further comprise contacting the candidate agent that has the first activity with a population of Th1 cells under conditions wherein said Th1 cells would normally be activated; and b) determining the effect of said agent on said activation.

[0019] In an additional aspect, the methods above can further comprise contacting said candidate agent with a population of regulatory T cells (Tregs) under conditions and determining the effect of said agent on Treg cell number or activity.

[0020] In a further aspect, the methods above determine efficacy by measuring the presence or absence of increased expression of a protein selected from the group consisting of IFNg, TNFα, GM-CSF, CD25, CD137, CD69, PD1, CD107A, HLA-DR, IL-2, IL-6, IL-4, IL-5, IL-10 and IL-13, wherein increased expression is an indication of activation.

[0021] The invention further provides methods of treating a disorder associated with the interaction of PVRIG and PVLR2 comprising administering to a patient a composition comprising a stimulator of PVRIG to effect treatment. The treatment that occurs can be one or more of a decrease in immune response, a decrease in activation of αβ and/or γδ T cells, a decrease in cytotoxic T cell activity, a decrease in NK and/or NKT cell activity, a decrease of αβ and/or γδ T-cell activity, a decrease in pro-inflammatory cytokine secretion; a decrease in IL-2 secretion, a decrease in interferon- [symbol] production, a decrease in Th1 response, a increase in Th2 response, an increase in inhibition of T cell activity, an increase in inhibition of CTL activity, an increase in inhibition of NK cell activity, an increase in αβ and/or γδ T cell exhaustion, a decrease in αβ and/or γδ T cell response, a decrease in activity of cytotoxic cells, a reduction in antigen-specific memory responses, an inhibition of apoptosis or lysis of cells, a decrease in cytotoxic or cytostatic effect on cells, a reduction in direct killing of cells, a decreases in Th17 activity, an reduction of complement dependent cytotoxicity and/or antibody dependent cell-mediated cytotoxicity.

[0022] In a further aspect in the methods above, the stimulator can be a protein or a nucleic acid. In some cases, the protein comprises an extracellular domain (ECD) of PVRIG. In some cases, the protein is a fusion protein comprising said ECD and a fusion partner. The fusion partner can be selected from the group consisting of a human IgG Fc domain and a human serum albumin (HSA).

[0023] In an additional aspect, the patient to whom the stimulator is administered has an immune disorder, which can be selected from the group consisting of an autoimmune disease, organ transplant rejection and inflammation. The autoimmune disease is selected from the group consisting of rheumatoid arthritis, lupus, Inflammatory bowel disease, psoriasis, multiple sclerosis and diabetes type I.

[0024] In further aspects, the invention provides composition comprising an isolated PVRIG polypeptide consisting of a PVRIG polypeptide ECD domain having at least 95% identity to the ECD domain of an amino acid sequence selected from the group consisting of the sequences depicted in FIG. 67, FIG. 91 and FIGS. 92A to 92AT. In some cases, the isolated PVRIG polypeptide has at least 99% identity to an amino acid sequence selected from the group consisting of the sequences depicted in FIG. 67, FIG. 91 and FIGS. 92A to 92AT. In some embodiments they have 100% identity.

[0025] In a further aspect, the invention provides compositions comprising a PVRIG fusion polypeptide comprising: a) an ECD from a PVRIG polypeptide; and b) a covalently attached fusion partner moiety. The fusion partner can be selected from the group consisting of a human IgG Fc domain, a human serum albumin (HSA) and a polyethylene glycol (PEG). In some cases, the ECD from the fusion partner can have 95%-99%-100% identity to the sequences depicted in FIG. 67, FIG. 91 and FIGS. 92A to 92AT.

[0026] In an additional aspect, the PVRIG polypeptide and the fusion partner moiety are directly covalently attached. In some cases, the fusion partner moiety is a polyethylene glycol (PEG) moiety.

[0027] In a further aspect, the PVRIG polypeptide and said fusion partner moiety are covalently attached using an exogeneous linker. In some cases, the exogeneous linker is selected from the group consisting of those depicted in FIGS. 93A-93C or has the formula (GGGS)n, wherein n is from 1 to 5.

[0028] In a further aspect, the fusion partner moiety is either a human serum albumin (HSA) or an Fc domain. In the latter case, the Fc domain is a human IgG Fc domain, selected from the group consisting of the Fc domain of human IgG1, the Fc domain of human IgG2, the Fc domain of human IgG3 and the Fc domain of human IgG4. In some cases, the Fc domain is a variant human Fc domain from IgG1 or IgG2.

[0029] In an additional aspect, the compositions further comprise a pharmaceutically acceptable carrier.

[0030] In a further aspect, the invention provides methods of treatment using the compositions above to a patient, such that said patient's immune response is suppressed as a result of treatment. In some cases, the patient has an immune disorder. In some cases, the immune disorder is selected from the group consisting of an autoimmune disease, and organ transplant rejection. In some cases, the autoimmune disease is selected from the group consisting of rheumatoid arthritis, lupus, Inflammatory bowel disease, psoriasis, multiple sclerosis, Diabetes type I.

### BRIEF DESCRIPTION OF THE DRAWINGS

[0031] FIG. 1 Schematic presentation of the mechanisms of action of the invention.

[0032] FIG. 2 presents mRNA Expression of PVRIG in various normal human tissues.

[0033] FIG. 3 presents mRNA expression of PVRIG in various immune population derived from peripheral blood and bone marrow (based on GSE49910).

[0034] FIG. 4 presents mRNA expression of PVRIG in various CD3+ lymphocyte population (based on GSE47855).

[0035] FIGS. 5A, 5B and 5C presents mRNA expression of PVRIG in specific cell populations. FIG. 5A resents mRNA expression of PVRIG in specific cell populations obtained by laser capture microscopy (based on GSE39397). FIG. 5B presents mRNA expression of PVRIG in CD4 T-cells from normal and cancer patient as well as expression form CD4 T-cell expression from draining lymph nodes and TILs form breast cancer patients (based on GSE36765). FIG. 5C presents mRNA expression of PVRIG from CD8 and CD4 T-cells derived from follicular lymphoma tumor and tonsil (based on GSE27928).

[0036] FIG. 6 presents PVRIG expression in normal tissues based on GTEx. Expression levels are shown in log 2(RPKM) values (fragments identified per million reads per kilobase). Values above 1 are considered high expression. Tissues are ranked from top to bottom by the median expression. Each dot on the plot represent a single sample.

[0037] FIG. 7 presents PVRIG expression in cancerous tissues based on TCGA. Expression levels are shown in log 2(RPKM) values (fragments identified per million reads per kilobase). Values above 1 are considered high expression. Tissues are ranked from top to bottom by the median expression. Each dot on the plot represent a single sample.

[0038] FIG. 8 shows a heatmap representation of the enrichment analysis results in three categories: protein interactions, pathways and disease associations. Results are ranked from top to bottom by average p-value per row. Only the top 10 results from each category are shown. Gray squares indicate p-values<0.05. Each column in the heatmap corresponds to a normal or cancer tissue from which a list of highly correlated genes was derived (r>0.55 using at least 50 samples). As shown in the heatmap, PVRIG correlates with a T cell gene expression signature which is strongly associated with the immune response and immune diseases.

[0039] FIG. 9 presents PVRIG expression in normal skin vs. melanoma (GTEx and TCGA analysis). Such over-expression was observed in additional solid tumors and results from infiltrating lymphocytes and NK cells in the tumor microenvironment. In normal condictions, no infiltrating immune cells are present and therefore PVRIG expression levels are very low.

[0040] FIG. 10 presents the correlations of PVRIG and PD1 in melanoma from TCGA samples, with several T cell makers in lung adenocarcinoma, colon adenocarcinoma and melanoma. The marker CD3 is a general markers for T cells and is also expressed on NKT cells. CD4 and CD8 markers are used to characterized subpopulation of T cells.

[0041] FIG. 11 shows expression of PVRIG on human PBLs. Human PBLs derived from two donors were evaluated for PVRIG expression. Both donor 61 and donor 40 showed significant staining with anti-PVRIG specific Ab.

[0042] FIG. 12 shows PVRIG-Ig exhibits strong binding to all four human melanoma cell lines MEL-23, Mel-624 and Mel-624.38 and mel-888 tested. Binding is not affected by co-culture with engineered melanoma specific T cells. Grey line corresponds to isotype control, solid black line corresponds to PVRIG-ECD-Ig.

[0043] FIG. 13 Correlation of PVRIG with T cells and subpopulations of T cells. CD3G is component of the T cell receptor complex, CD4 is a maker for T helper cells and CD8A is component of CD8 protein used to identify cytotoxic T cells. PVRIG highly correlated with T cells in many types of tumors including lung adenocarcinoma, colon adenocarcinoma and melanoma which are shown here.

[0044] FIG. 14 presents representative images from the Confirmation/Specificity screen. All hits from the Primary screen, and EGFR-expressing vector (negative control), were re-arrayed/expressed in duplicate and probed with PVRIG at 20 μg/ml. A specific hit with strong intensity is shown in green (PVRL2). Non-specific hits are shown in black. Another weak hit (MAG) was later shown to bind also other ligands, thus suggesting that it is not specific.

[0045] FIGS. 15A-15E presents effect of various PVRIG-ECD-Ig M:M proteins on mouse CD4 T cell activation. Plates were coated with anti-CD3 mAb (2 μg/mL) in the presence of 10 μg/ml PVRIG-ECD Ig (batch #198) or control mIgG2a as described in materials and methods. Wells were plated with 1×10⁵ CD4+CD25−mouse T cells per well in the presence of 2 μg/ml of soluble anti-CD28. (A) The expression of CD69 was analyzed by flow cytometry at 48 h post-stimulation, representative histograms are shown. Each bar is the mean of duplicate cultures, the error bars indicating the standard deviation. (B-C) Culture supernatants were collected at 48 h post-stimulation and mouse IL-2 and IFNγ levels were analyzed by ELISA. Results are shown as Mean±Standard errors of duplicate samples. (D) Dose response effect of immobilized PVRIG-ECD Ig (FIG. 92BB on surface CD69 (D) and IFNγ secretion (E) is presented. Each bar is the mean of triplicate cultures, the error bars indicating the standard errors.

[0046] FIG. 16 presents FACS analysis on PVRIG transduced PBLs using a specific antibody. The percent of cells staining positive (relative to empty vector transduced) for the protein is provided.

[0047] FIG. 17 presents FACS analysis on PVRIG (either co-expressed with F4 TCR or in a bi-cystronic vector with F4 TCR and NGFR transduced PBLs using a specific antibody. The percent of cells staining positive (relative to empty vector transduced) for the protein is provided.

[0048] FIGS. 18A-18B presents FACS analysis performed on TCR transduced stimulated PBLs for experiment 1 (FIG. 18A) and in experiment 2 (FIG. 18B) using a specific monoclonal antibody that recognizes the extra-cellular domain of the beta-chain from the transduced specific TCR. The percentage of cells staining positive is provided.

[0049] FIG. 19 shows expression of PVRIG on F4 expressing PBLs causes a reduction of IFNγ secretion upon co-culture with SK-MEL23, MEL-624 and MEL-624.38 in comparison to expression of an empty vector.

[0050] FIGS. 20A-20B shows expression of PVRIG and F4 in PBLs by co-transduction (FIG. 20A) does not affect IFNγ secretion in co-culture with melanoma cell lines. Expression of PVRIG and F4 in PBLs using a bi-cystronic vector (FIG. 20B) causes a reduction of IFNγ secretion upon co-culture with SK-MEL23, MEL-624 and MEL-624.38 in comparison to expression of an empty vector.

[0051] FIG. 21 shows expression of PVRIG and F4 in PBLs using a bi-cystronic vector causes a reduction in T cell mediated cytotoxicity upon co-culture with melanoma cell lines.

[0052] FIG. 22 shows PVRIG expression in 3 subgroups of low, no change and high levels of exhausted T cells. Exhausted T cells were selected based on high level expression of 4 markers: CD8A, PD-1, TIM-3 and TIGIT. Low expressing samples are not shown since none had any detectable levels of PVRIG.

[0053] FIGS. 23A and 23B: Western blot analysis of ectopically expressed human PVRIG protein. Whole cell extracts of HEK293 cell pools, previously transfected with expression construct encoding human PVRIG-flag (lane 2) or with empty vector (lane 1) were analyzed by WB using an anti-flag antibody (23A) or anti-PVRIG antibodies (23B).

[0054] FIG. 24: Cell surface expression of HEK293 cells ectopically expressed human PVRIG-flag protein by FACS analysis. Anti-PVRIG pAb (Abnova) was used to analyze HEK293 cells stably expressing the human PVRIG-flag protein. Cells expressing the empty vector were used as negative control. Detection was carried out by Goat Anti-mouse PE-conjugated secondary Ab and analyzed by FACS.

[0055] FIG. 25 depicts the full length sequence of human PVRIG (showing two different methionine starting points) and the PVRIG Fc fusion protein used in the Examples. The signal peptide is underlined, the ECD is double underlined, and the Fc domain is the dotted underlining.

[0056] FIG. 26 depicts the sequence of the human Poliovirus receptor-related 2 protein (PVLR2, also known as nectin-2, CD112 or herpesvirus entry mediator B, (HVEB)), the binding partner of PVRIG as shown in Example 5. PVLR2 is a human plasma membrane glycoprotein.

[0057] FIG. 27 PVRIG antibody specificity towards HEK cells engineered to overexpress PVRIG. Data shows absolute geometric MFI (gMFI) measurements as a function of increasing antibody concentration. The broken black line with squares shows staining of HEK hPVRIG cells with a representative anti-human PVRIG antibody (CPA.7.021), and the solid black line with circles shows staining of HEK parental cells with the same antibody.

[0058] FIG. 28 PVRIG RNA was assessed in various cancer cell lines by qPCR. Data shown is relative expression of PVRIG RNA in cell lines as fold change over levels in expi cells as assessed by the 2^{(-ΔΔCt)} method.

[0059] FIG. 29 PVRIG RNA was assessed in sorted PBMC subsets by qPCR. Data shown is relative expression of PVRIG RNA in each subset as fold change over levels in HEK GFP cells as assessed by the 2^{(-ΔΔCt)} method. D47-D49 denote three individual donors. CD4 denotes CD4 T cells, CD8 denotes CD8 T cells, CD14 denotes monocytes, and CD56 denotes NK cells.

[0060] FIGS. 30A and 30B. FIG. 30A: PVRIG RNA was assessed in sorted CD4 T cells (CD4) and NK cells (NK) under naïve and activated conditions by qPCR. CD4 T cells were stimulated with human T cell stimulator dynabeads and 50 U/ml IL-2 for 3 days. NK cells were stimulated in 50 U/ml IL-2 for 3 days. Data shown is relative expression of PVRIG RNA in each subset as fold change over levels in expi cells as assessed by the 2^{(-ΔΔCt)} method. Jurkat is included as a positive control. D47-D49 denote three individual donors. FIG. 30B PVRIG RNA was assessed in sorted CD8 T cells under naïve and activated conditions by qPCR. CD8 T cells were stimulated with human T cell stimulator dynabeads and 100 U/ml IL-2 for 3 days. Data shown is relative expression of PVRIG RNA in each subset as fold change over levels in expi cells as assessed by the 2^{(-ΔΔCt)} method. Jurkat is included as a positive control. D49, 70, and 71 indicate three individual donors.

[0061] FIGS. 31A and 31B PVRIG binding characteristics to HEK hPVRIG engineered cell lines, HEK parental cells, CA46 cells, and Jurkat cells. HEK OE denotes HEK hPVRIG cells, HEK par denotes HEK parental cells. For Jurkat and CA46 data, gMFIr indicates the fold difference in geometric MFI of PVRIG antibody staining relative to their controls. Concentration indicates that at which the gMFIr was calculated. Not reliable fit indicates antibody binding characteristics do meet appropriate mathematical fitting requirements. Some antibodies were not tested in some conditions due to poor binding characteristics, specificity, or manufacturability.

[0062] FIGS. 32A-32B PVRIG binding characteristics to primary human PBMC, cyno transient over-expressing cells, and cyno primary PBMC. Expi cyno OE denotes expi cells transiently transfected with cPVRIG, expi par denotes expi parental cells. gMFIr indicates the fold difference in geometric MFI of PVRIG antibody staining relative to their controls. Concentration indicates that at which the gMFIr was calculated. Some antibodies were not tested in some conditions due to poor binding characteristics, specificity, or manufacturability as in FIGS. 31A-31B. Additionally, select antibodies were triaged for screening on cyno PBMC subsets based on their ability to bind cPVRIG transient cells or functionality. Expression of PVRIG on CD4 T cells is similar to that described in the table for CD8 T cells.

[0063] FIG. 33 PVRIG antibody specificity towards CA46 and Jurkat cells. Data shows absolute geometric MFI (gMFI) measurements by FACS as a function of increasing antibody concentration. The solid black line with triangles shows staining of CA46 cells with anti-human PVRIG antibody (CPA.7.021) and the solid black line with squares shows staining of Jurkat cells. OV-90 (broken line with upside down triangles) and NCI-H4411 (broken line with diamonds) are shown as negative controls.

[0064] FIGS. 34A-34D PVRIG antibody cross-reactivity towards cPVRIG transient cells. Data shows an example of an antibody that is a negative binder (a-b, CPA.7.021) and a positive binder (c-d, CPA.7.024) on cPVRIG transient cells. Solid grey histograms indicate control antibody, open black histograms indicate the antibody of interest. Cells were stained with each antibody at a concentration of 5 μg/ml.

[0065] FIG. 35 cPVRIG RNA was assessed in sorted cyno PBMC subsets by qPCR. Data shown is the average Ct values from three cyno donors as detected by two primer sets directed at two distinct areas of the cPVRIG gene.

[0066] FIGS. 36A-36C cPVRIG protein was assessed on a) CD16+ lymphocytes (NK cells), b) CD14+CD56+ myeloid cells (monocytes), and c) CD3+ lymphocytes (T cells) by FACS. Data is shown as absolute geometric MFI, with the solid black line indicating background fluorescence levels. Data is representative of a sample of our panel of anti-human PVRIG antibodies tested in three cyno donors.

[0067] FIGS. 37A and 37B shows the CDR sequences for Fabs that were determined to successfully block interaction of the PVRIG with its counterpart PVRL2, as described in Example 5.

[0068] FIGS. 38A-38AA shows the amino acid sequences of the variable heavy and light domains, the full length heavy and light chains, and the variable heavy and variable light CDRs for the enumerated human CPA anti-PVRIG sequences of the invention that both bind PVRIG and block binding of PVRIG and PVLR2.

[0069] FIGS. 39A-39H depicts the amino acid sequences of the variable heavy and light domains, the full length heavy and light chains, and the variable heavy and variable light CDRs for eight human CPA anti-PVRIG sequences of the invention that bind PVRIG and but do not block binding of PVRIG and PVLR2.

[0070] FIGS. 40A-40D depicts the CDRs for all CPA anti-PVRIG antibody sequences that were generated that bind PVRIG, including those that do not block binding of PVRIG and PVLR2.

[0071] FIGS. 41A to 41DD depicts the variable heavy and light chains as well as the vhCDR1, vhCDR2, vhCDR3, vlCDR1, vlCDR2 and vlCDR3 sequences of each of the enumerated CHA antibodies of the invention, CHA.7.502, CHA.7.503, CHA.7.506, CHA.7.508, CHA.7.510, CHA.7.512, CHA.7.514, CHA.7.516, CHA.7.518, CHA.7.520.1, CHA.7.520.2, CHA.7.522, CHA.7.524, CHA.7.526, CHA.7.527, CHA.7.528, CHA.7.530, CHA.7.534, CHA.7.535, CHA.7.537, CHA.7.538.1, CHA.7.538.2, CHA.7.543, CHA.7.544, CHA.7.545, CHA.7.546, CHA.7.547, CHA.7.548, CHA.7.549 and CHA.7.550 (these include the variable heavy and light sequences from mouse sequences (from Hybridomas).

[0072] FIG. 42 depicts the binning results from Example 11. Not binned: CPA.7.029 and CPA.7.026 (no binding to the antigen).

[0073] FIG. 43 Binary matrix of pair-wise blocking (“0”, red box) or sandwiching (“1”, green box) of antigen for 35 anti-PVRIG mAbs. MAbs listed vertically on the left of the matrix are mAbs covalently immobilized to the ProteOn array. MAbs listed horizontally across the top of the matrix were analytes injected with pre-mixed antigen. Clone CPA.7.041 was studied only as an analyte. The black boxes outline four epitope bins according to the vertical blocking patterns of the mAbs.

[0074] FIG. 44 Hierarchical clustering dendrogram of the vertical binding patterns of each mAb in the binary matrix in FIG. 43. There are four bins of mAbs with identical epitope blocking patterns within each group. The only difference between bins 1 and 2 is mAbs in bin 1 block antigen binding to clone CPA.7.039 while mAbs in bin 2 can sandwich the antigen with CPA.7.039. Clone CPA.7.050 can sandwich the antigen with all other clones.

[0075] FIGS. 45A-45JJ Sensorgrams indicating the antigen blocking pattern for CPA.7.036 with all other immobilized mAbs, which are representative data for Bin #1. Each panel represents a different ProteOn chip array spot having a different immobilized mAb. Blue responses are antigen-only controls. Black responses are pre-mixed solutions of CPA.7.036 in molar excess of antigen. Gray responses are mAb-only control injections. CPA.7.36 blocks antigen binding to all other mAbs except for CPA.7.050 (JJ).

[0076] FIGS. 46A-46JJ Sensorgrams indicating the antigen blocking pattern for CPA.7.034 with all other immobilized mAbs, which are representative data for Bin #2. Each panel represents a different ProteOn chip array spot having a different immobilized mAb. Blue responses are antigen-only controls. Black responses are pre-mixed solutions of CPA.7.34 in molar excess of antigen. Gray responses are mAb-only control injections. CPA.7.34 blocks antigen binding to all other mAbs except for CPA.7.039 (DD) and CPA.7.050 (JJ).

[0077] FIGS. 47A-47JJ Sensorgrams indicating the antigen blocking pattern for CPA.7.039 with all other immobilized mAbs. CPA.7.039 is the only mAb in Bin #3. Each panel represents a different ProteOn chip array spot having a different immobilized mAb. Blue responses are antigen-only controls. Black responses are pre-mixed solutions of CPA.7.039 in molar excess of antigen. Gray responses are mAb-only control injections. Panels C, F, H, J, L, N, R, S, Z, EE, GG, HH, II, and JJ show sandwiching of the antigen.

[0078] FIGS. 48A-48JJ Sensorgrams indicating the antigen blocking pattern for CPA.7.050 with all other immobilized mAbs. CPA.7.050 is the only mAb in Bin #4. Each panel represents a different ProteOn chip array spot having a different immobilized mAb. Blue responses are antigen-only controls. Black responses are pre-mixed solutions of CPA.7.50 in molar excess of antigen. Gray responses are mAb-only control injections. Only panel JJ shows antigen blocking which is where CPA.7.050 was injected w/antigen over itself.

[0079] FIG. 49 show the results of the SPR experiments of Example 12.

[0080] FIGS. 50A-50Q SPR sensorgram data of multiple concentrations of anti PVRIG fabs in supernatant injected over captured human PVRIG fusion protein (black lines). The red lines show the 1:1_global kinetic fit to multiple concentrations of the fabs to estimate the kₐ and k_{d} of the interactions. Letters indicate the clone listed in Table 1, which also lists the resulting rate constants and calculated K_{D}

[0081] FIGS. 51A-51C SPR sensorgrams for clones CPA.7.009 (A), CPA.7.003 (B), and CPA.7.014 (C) binding to captured human PVRIG fusion protein. These are examples where the sensorgrams showed complex, multi-phasic kinetics and therefore the rate constants could not be reliably estimated.

[0082] FIGS. 52A and 52B shows the results of the blocking studies from “Additional Validation Study 4” in Example 5.

[0083] FIG. 53 shows that following allo-activation, the expression of PVRIG was upregulated on CD4+ T cells as well as on CD8+ T cells and double negative gamma delta T cells. This upregulation was observed in PBMCs of one out of two donors tested.

[0084] FIG. 54 shows the human cell lines tested in Example 1G.

[0085] FIG. 55 shows the mouse cell lines tested in Example 1G.

[0086] FIGS. 56A-56C. Transcript expression of human PVRIG in various Human cancer cell lines. Verification of the human transcript in several cell lines was performed by qRT-PCR using TaqMan probe. Column diagram represents data observed using TaqMan probe Hs04189293_g1. Ct values are detailed in the table. Analysis indicating high transcript in Jurkat, HUT78 and HL60, and lower levels in THP1 and RPMI8226 cell lines.

[0087] FIGS. 57A-57B Transcript expression of mouse PVRIG in various mouse cell lines. Verification of the mouse transcript in several cell lines was performed by qRT-PCR using TaqMan probe. Column diagram represents data observed using TaqMan probe CC70L8H. Ct values are detailed in the table. Analysis indicating high transcript in NIH/3T3, Renca, SaI/N and J774A.1, and lower levels in CT26 and B104-1-1 cell lines.

[0088] FIG. 58 Endogenous expression of PVRIG protein was analyzed by WB with the commercial anti-human PVRIG rabbit polyclonal antibody (Sigma, cat #HPA047497), using whole cell extracts of various cell lines. Extracts of HEK293 cells ectopically over-expressing human PVRIG (lane 2) or cells transfected with empty vector (lane 1), were used as positive and negative controls, respectively.

[0089] FIG. 59 qRT-PCR analysis of human PVRIG transcript in Jurkat cell line transfected with PVRIG siRNA. Jurkat human cancer cell line, transfected with human PVRIG siRNA or with scrambled siRNA were analyzed by qRT-PCR using human PVRIG TaqMan probe #Hs04189293_g1, and was normalized with geo-mean of two housekeeping genes indicated in table above. Ct values are detailed in the table. Standard deviation of technical triplicates of the PCR reaction are indicated.

[0090] FIG. 60 Membrane expression of human PVRIG protein in Jurkat human cell line transfected with human PVRIG siRNA. Jurkat cells transfected with Human PVRIG siRNA were stained with monoclonal anti-PVRIG Ab Inc, CPA.7.021 (left panel, green line) or with IgG2 isotype control antibody (left panel, blue line) and with Sigma Ab (right panel, red line) or with IgG (right panel, blue line). Cells transfected with Scrambled siRNA were stained with the same anti-PVRIG (orange) or isotype control (left panel red line for mAb staining; right panel green line for Sigma Ab). Following cell washing, PE-Goat anti-mouse secondary conjugated Ab was added to Sigma Ab only.

[0091] FIG. 61 indicates the summary of the findings described in this report, highlighting the cell lines showing correlation between qPCR and FACS, confirmed by knock down, HSKG—housekeeping gene, +—Positive, NT—Not Tested, X—negative, KD—knockdown.

[0092] FIG. 62 indicates the summary of the findings described in this report, highlighting the cell lines showing correlation between qPCR and FACS, confirmed by knock down. HSKG—housekeeping gene, +—Positive, NT—Not Tested, X—negative, KD—knockdown.

[0093] FIGS. 63A-63D depicts the vhCDR1, vhCDR2, vhCDR3, vlCDR1, vlCDR2 and vlCDR3 sequences of each of the enumerated CPA antibodies of the invention, CPA.7.001 to CPA.7.050 are human sequences (from Phage display).

[0094] FIGS. 64A and 64B shows the results of the screening in Example 1B.

[0095] FIG. 65 Antibodies specifics and staining concentration used in Example 1I.

[0096] FIGS. 66A-66C depicts the sequences of human IgG1, IgG2, IgG3 and IgG4.

[0097] FIG. 67 depicts a number of human PVRIG ECD fragments.

[0098] FIG. 68 depicts the binding curve for CPA.7.021 as shown in EXAMPLE 13.

[0099] FIGS. 69A-69C Detection of CD137 and PD-1 surface expression. CD8+ T cells, CD4+ T cells and TILs were activated and monitored over time at 4 time-points as described in M&M. Resting or activated cells were first gated for lymphocytes (FSC-A vs. SSC-A), followed by live cells gate, further gated for singlets (FSC-H vs. FSC-A), CD4/CD8 positive cells and further gated for CD137 and PD1. Surface expression of PD-1 (left) and CD137 (right) on (A) CD8+ T cells (B) CD4+ T cells and (C) TILs at different time-points normalized to isotype control over the time course of activation.

[0100] FIGS. 70A-70C PVRIG expression on resting and activated CD4+T and CD8+ T cells. CD4+ and CD8+ T cells were activated and monitored over time at 4 time-points as described in M&M. Cells were stained with viability dye, then incubated with anti-PVRIG and isotype control (7.5 μg/ml), and evaluated by flow cytometry. (A) Expression on CD4+ T cells. Expression of PVRIG on live resting (time 0) and activated CD4+ cells following singlet gating for 24, 48, 72 h and 144h compared to isotype control. (B) Expression on CD8+ T cells. Expression of PVRIG on live resting (time 0) and activated CD8+ cells following singlet gating for 24, 48, 72 h and 144 h compared to isotype control. Shown are the Geometric Mean of the fluorescent intensity values obtained. (C) Normalization of fold induction staining with anti-PVRIG-CPA.7.021 ab compared to human IgG2 isotype over the time course of activation.

[0101] FIGS. 71A-71C PVRIG expression on resting and activated TILs. TILs Mart1 and 209 were activated and monitored over time at 4 time-points as described in M&M. Cells were stained with viability dye, then incubated with anti-PVRIG and isotype control (7.5 μg/ml), and evaluated by flow cytometry. (A) Expression on TIL Mart1. Expression of PVRIG on live resting (time 0) and activated TIL following singlet gating for 24, 48, 72 h and 144 h compared to isotype control. (B) Expression on TIL 209. Expression of PVRIG on live resting (time 0) and activated TIL following singlet gating for 24, 48, 72 h and 144 h compared to isotype control. Shown are the Geometric Mean of the fluorescent intensity values obtained. (C) Normalization of fold induction staining with anti PVRIG-CPA.7.021 ab compared with human IgG2 isotype control over the time course of activation.

[0102] FIG. 72 Expression of PVRL2 on monocyte-derived DC. PVRL2 expression (triangles with broken line) as a function of time (days) relative to isotype control (circles with solid line) is shown. Day after differentiation indicates time after addition of GM-CSF and IL-4 to monocytes.

[0103] FIGS. 73A-73B Expression of PVRIG on CD4 and CD8 T cells in the MLR. The expression of PVRIG on proliferating (CFSE low) and non-proliferating T cells (CFSE high) is shown. Data is derived from three individual CD3 T cell donors and from a range of PVRIG antibodies. CFSE is measured on the X axis and PVRIG expression is measured on the Y axis. The top 3 series of scatter plots indicates PVRIG expression on CD4 T cells, and the bottom 3 series indicates expression on CD8 T cells.

[0104] FIGS. 74A and 74B Normalised expression of PVRIG on CD4 and CD8 T cells in the MLR. The expression of PVRIG relative to mIgG1 isotype control is shown from three individual CD3 T cell donors across all antibodies analysed.

[0105] FIGS. 75A and 75B PVRIG antibodies increase T cell proliferation in the MLR. The percentages of CF SE low cells are shown from MLR assays treated with the indicated PVRIG antibodies. Each graph represents one individual CD3 T cell donor.

[0106] FIG. 76 FACS-based epitope analysis of PVRIG antibodies on T cells. The level of binding of conjugated CPA.7.021 (derived from phage campaign) is indicated after pre-incubation of T cells with unconjugated PVRIG antibodies derived from our hybridoma campaign, as well as relevant controls. Analysis was performed on CFSE low T cells derived from the MLR.

[0107] FIG. 77 PVRIG antibody specificity towards HEK cells engineered to overexpress PVRIG. Data shows absolute geometric MFI (gMFI) measurements as a function of increasing antibody concentration. The broken black line with squares shows staining of HEK hPVRIG cells with a representative anti-human PVRIG antibody (CHA.7.518), and the solid black line with circles shows staining of HEK parental cells with the same antibody.

[0108] FIG. 78 PVRIG antibodies show specificity towards Jurkat cells. Data shows absolute geometric MFI (gMFI) measurements by FACS as a function of increasing antibody concentration. The broken black line with squares shows staining of Jurkat cells with anti-human PVRIG antibody (CHA.7.518) and the solid black line with circles shows staining with an mIgG1 control antibody.

[0109] FIGS. 79A and 79B PVRIG hybridoma antibody binding characteristics to HEK hPVRIG engineered cell lines, HEK parental cells, and Jurkat cells. HEK OE denotes HEK hPVRIG cells, HEK par denotes HEK parental cells. For Jurkat data, gMFIr indicates the fold difference in geometric MFI of PVRIG antibody staining relative to their controls. Concentration indicates that at which the gMFIr was calculated. No binding indicates antibody does not bind to the tested cell line. Highlighted antibodies are the ‘top four’ antibodies of interest.

[0110] FIGS. 80A and 80B PVRIG hybridoma antibody binding characteristics to primary human PBMC, cyno over-expressing cells, and cyno primary PBMC. Expi cyno OE denotes expi cells transiently transfected with cPVRIG, expi par denotes expi parental cells. gMFIr indicates the fold difference in geometric MFI of PVRIG antibody staining relative to their controls. Concentrations indicate that at which the gMFIr was calculated. Not tested indicates antibodies that were not tested due to an absence of binding to human HEK hPVRIG, expi cPVRIG cells, or not meeting binding requirements to PBMC subsets. Highlighted antibodies are the ‘top four’ antibodies of interest.

[0111] FIGS. 81A and 81B Summary of blocking capacity of PVRIG antibodies in the FACS-based competition assay. The IC₅₀ of inhibition is indicated. No IC₅₀ indicates that these antibodies are non-blockers. Highlighted antibodies are the ‘top four’ antibodies of interest.

[0112] FIG. 82 KD validation performed in TILs 24 hr post-electroporation with siRNA. TILs were stained with anti PVRIG or anti PD-1 analyzed by FACS. Percentage of the KD population is calculated relative to SCR stained with the relevant Ab.

[0113] FIGS. 83A-83C KD TILs (MART-1 specific) were co-cultured with melanoma cells 624 in 1:1 E:T for 18 hr and stained with anti CD8a antibody as well as anti CD137 antibody and analyzed by FACS. Geometric mean fluorescence intensity are plotted (A). Co-culture supernatant was collected as well and tested in Th1 Th2 Th17 cytometric bead array assay to detect secreted cytokines. IFNγ and TNF levels were detected (B,C). The percentage effect of a treatment is calculated by comparing each treatment to SCR control. The figure shows representative data of 2 independent experiments. Treatments were compared by Student's t-test (*P≤0.05, **P≤0.01) of triplicate samples.

[0114] FIGS. 84A-84B KD TILs (F4 gp100 specific) were co-cultured with melanoma cells 624 in 1:3 E:T for 18 hr and stained with anti CD8a antibody as well as anti CD137 antibody and analyzed by FACS. Geometric mean fluorescence intensity are plotted (A). Co-culture supernatant was collected as well and tested in Th1 Th2 Th17 cytometric bead array assay to detect secreted cytokines. IFNγ levels were detected (B). Percentage of the effect a treatment has is calculated by comparing each treatment to SCR control. Figure shows representative data of 2 independent experiments. Treatments were compared by Student's t-test (*P≤0.05, **P≤0.01) of triplicate samples.

[0115] FIGS. 85A-85B TILs from were co-cultured with melanoma cells 624 at 1:1 E:T for 18 hr in the presence of anti-PVRIG Ab (CPA.7.021; 10 μg/ml), anti-TIGIT (10A7 clone; or in combination. Supernatant was collected and tested in Th1 Th2 Th17 cytometric bead array assay to detect secreted cytokines. IFNγ (A) and TNF (B) levels were detected. Treatments were compared by Student's t-test (*P≤0.05, **P≤0.01) of triplicate samples.

[0116] FIGS. 86A-86F MART-1 or 209 TILs were co-cultured with melanoma cells 624 at 1:1 E:T for 18 hr in the presence of anti-PVRIG Ab (CPA.7.021; 10 μg/ml), anti-DNAM1 (DX11 clone; 10 μg/ml) or in in combination. Supernatant was collected and tested in Th1 Th2 Th17 cytometric bead array assay to detect secreted cytokines. IFNγ (A,D) and TNF (B,E) levels were detected. TILs were stained for surface expression of CD137 (C,F).

[0117] FIGS. 87A and 87B TILs (F4) were co-cultured with melanoma cells 624 at 1:3 E:T for 18 hr in the presence of anti-PVRIG Ab (CPA.7.021; 10 μg/ml), anti-TIGIT (10A7 clone; anti-PD1 (mAb 1B8, Merck; 10 μg/ml) or in combination. Supernatant was collected and tested in Th1 Th2 Th17 cytometric bead array assay to detect secreted cytokines. IFNγ (A) and TNF (B) levels were detected.

[0118] FIGS. 88A-88I I depict four humanized sequences for each of CHA.7.518, CHA.7.524, CHA.7.530, CHA.7.538_1 and CHA.7.538_2. Note that the light chain for CHA.7.538_2 is the same as for CHA.7.538_1. The “H1” of each is a “CDR swap” with no changes to the human framework. Subsequent sequences alter framework changes shown in larger bold font. CDR sequences are noted in bold. CDR definitions are AbM from website www.bioinf.org.uk/abs/. Human germline and joining sequences from IMGT® the international ImMunoGeneTics® information system www.imgt.org (founder and director: Marie-Paule Lefranc, Montpellier, France). Residue numbering shown as sequential (seq) or according to Chothia from website www.bioinf.org.uk/abs/(AbM). “b” notes buried sidechain; “p” notes partially buried; “i” notes sidechain at interface between VH and VL domains. Sequence differences between human and murine germlines noted by asterisk (*). Potential additional mutations in frameworks are noted below sequence. Potential changes in CDR sequences noted below each CDR sequence as noted on the figure (#deamidation substitutions: Q/S/A; these may prevent asparagine (N) deamidation. @ tryptophan oxidation substitutions: Y/F/H; these may prevent tryptophan oxidation; @ methionine oxidation substitutions: L/F/A).

[0119] FIGS. 89A-89E depicts a collation of the humanized sequences of five CHA antibodies.

[0120] FIG. 90 depicts schemes for combining the humanized VH and VL CHA antibodies of FIGS. 88A-88I and FIGS. 89A-89E. The “chimVH” and “chimVL” are the mouse variable heavy and light sequences attached to a human IgG constant domain.

[0121] FIG. 91 PVRIG hybridoma antibody binding characteristics to primary human PBMC, cyno over-expressing cells, and cyno primary PBMC. Expi cyno OE denotes expi cells transiently transfected with cPVRIG, expi par denotes expi parental cells. gMFIr indicates the fold difference in geometric MFI of PVRIG antibody staining relative to their controls. Concentrations indicate that at which the gMFIr was calculated. Not tested indicates antibodies that were not tested due to an absence of binding to human HEK hPVRIG, expi cPVRIG cells, or not meeting binding requirements to PBMC subsets. Highlighted antibodies are four antibodies for which humanization was done (See FIG. 90).

[0122] FIG. 92 Summary of blocking capacity of PVRIG antibodies in the FACS-based competition assay. The IC50 of inhibition is indicated. No IC50 indicates that these antibodies are non-blockers. Highlighted antibodies are four antibodies for which humanization was done (See FIG. 90).

[0123] FIGS. 93A-93C Effect of PVRIG antibodies in blocking the interaction between PVRIG and PVRL2. (a-b) Data shows changes in absolute gMFI representing changes in binding of soluble PVRIG to HEK cells when four PVRIG antibodies are added to disrupt the interaction. Also indicated are the IC₅₀ values of each antibody in each assay. A) Data shows disruption of soluble PVRIG with HEK cells when the antibodies are pre-incubated with antigen. B) Data shows disruption of soluble PVRIG with HEK cells when the antibodies are added concomitantly with antigen. C) Data shows changes in absolute gMFI representing changes in binding of soluble PVRL2 Fc to HEK hPVRIG cells when four PVRIG antibodies are added to disrupt the interaction. IC₅₀ values of each antibody are indicated. ND denotes not determined.

[0124] FIGS. 94A-94H NK cell receptor and ligand expression on Reh cells. Expression of NK cell receptors such as a) PVRIG, b) DNAM-1, c) TIGIT are shown. Expression of NK receptor ligands such as d) PVR, e) PVRL2, ULBP2/5/6, g) ULBP3, and h) MICAS are shown. Solid grey histograms represent isotype controls and open black histograms represent the antibody of interest.

[0125] FIGS. 95A-95F Effect of PVRIG antibodies on enhancing NK cell-mediated cytotoxicity against Reh cells. The effect of 5 μg/ml CPA.7.002 (a), CPA.7.005 (b), CPA.7.021 (a-c), and CPA.7.050 (c) was examined in NK cell cytotoxicity assays against Reh cells where the number of NK cells was titrated against a constant number of Reh cells. d) The effect of varying the concentration of CPA.7.002 and CPA.7.021 on NK cell-mediated cytotoxicity with a constant number of NK to Reh cells (5:1) was examined. DNAM-1 (e) and TIGIT (f) were examined in assays with conditions as outlined in panels a-c.

[0126] FIGS. 96A-96H NK cell receptor and ligand expression on MOLM-13 cells. Expression of NK cell receptors such as a) PVRIG, b) DNAM-1, c) TIGIT are shown. Expression of NK receptor ligands such as d) PVR, e) PVRL2, f) ULBP2/5/6, g) ULBP3, and h) MICAS are shown. Solid grey histograms represent isotype controls and open black histograms represent the antibody of interest.

[0127] FIGS. 97A and 97B Effect of PVRIG antibodies on enhancing NK cell-mediated cytotoxicity against MOLM-13 cells. a) The effect of 5 μg/ml CPA.7.002, CPA.7.005, and CPA.7.021 was examined in NK cell cytotoxicity assays against MOLM-13 cells where the number of NK cells was titrated against a constant number of MOLM-13 cells. b) TIGIT was examined similar to panel a.

[0128] FIG. 98 Summary of blocking capacity of PVRIG antibodies in the cellular biochemical assay. Assay permutation and orientation, and the IC₅₀ of inhibition are indicated. (P) indicates the assay permutation where PVRIG antibodies are pre-incubated with PVRIG antigen prior to addition to HEK cells. (NP) indicates the concomitant addition of PVRIG antibodies and PVRIG antigen to HEK cells. Increased binding indicates that PVRL2 Fc binding to HEK hPVRIG cells was enhanced, rather than inhibited.

[0129] FIG. 99: Summary of the activity of select PVRIG antibodies in NK cell cytotoxicity assays against Reh and MOLM-13 cells. Fold change in cytotoxicity relative to control was calculated by dividing the absolute level of killing (%) in the condition with PVRIG antibody, by the absolute level of killing (%) with control antibody. Fold change is calculated from the 5:1 effector to target ratio.

[0130] FIG. 100 Sequence alignment of PVRIG orthologs. Aligned sequences of the human, cynomolgus, marmoset, and rhesus PVRIG extra-cellular domain. The differences between human and cynomolgus are highlighted in yellow.

[0131] FIG. 101 Binding of anti human PVRIG antibodies to cyno, human, cyno/human hybrid PVRIG variants. Binding of antibodies to wild type cyno PVRIG (●), H61R cyno PVRIG (▪), P67S cyno PVRIG (▴), L95R/T97I cyno PVRIG (▾), and wild type human PVRIG (♦) are shown. The ELISA signals are plotted as a function of antibody concentration.

[0132] FIG. 102 Correlation of epitope group and cyno cross-reactivity of anti-human PVRIG antibodies.

[0133] FIGS. 103A-103BX shows a number of sequences of use in the invention.

[0134] FIGS. 104A and 104B shows the alignment of the PVRIG protein isoforms as splice variants. P0 is SEQ ID NO:1557, P1 is SEQ ID NO:1558, P6 is SEQ ID NO:1559, P8 is SEQ ID NO:1560, P4 is SEQ ID NO:1561, P7 is SEQ ID NO:1562, P14 is SEQ ID NO:1563, P3 is SEQ ID NO:1564, P10 is SEQ ID NO:1565 and P13 is SEQ ID NO:1566.

[0135] FIG. 105 depicts a number of linker sequences that can find use in the present invention.

### DETAILED DESCRIPTION OF THE INVENTION

### I. Introduction

[0136] Cancer can be considered as an inability of the patient to recognize and eliminate cancerous cells. In many instances, these transformed (e.g. cancerous) cells counteract immunosurveillance. There are natural control mechanisms that limit T-cell activation in the body to prevent unrestrained T-cell activity, which can be exploited by cancerous cells to evade or suppress the immune response. Restoring the capacity of immune effector cells—especially T cells—to recognize and eliminate cancer is the goal of immunotherapy. The field of immuno-oncology, sometimes referred to as “immunotherapy” is rapidly evolving, with several recent approvals of T cell checkpoint inhibitory antibodies such as Yervoy, Keytruda and Opdivo. These antibodies are generally referred to as “checkpoint inhibitors” because they block normally negative regulators of T cell immunity. It is generally understood that a variety of immunomodulatory signals, both costimulatory and coinhibitory, can be used to orchestrate an optimal antigen-specific immune response. Generally, these antibodies bind to checkpoint inhibitor proteins such as CTLA-4 and PD-1, which under normal circumstances prevent or suppress activation of cytotoxic T cells (CTLs). By inhibiting the checkpoint protein, for example through the use of antibodies that bind these proteins, an increased T cell response against tumors can be achieved. That is, these cancer checkpoint proteins suppress the immune response; when the proteins are blocked, for example using antibodies to the checkpoint protein, the immune system is activated, leading to immune stimulation, resulting in treatment of conditions such as cancer and infectious disease.

[0137] Thus, without wishing to be limited by a single hypothesis, PVRIG shows inhibitory effects on the following immune functions: T cell activation and proliferation, cytotoxic T lymphocyte (CTL) immunity and CTL-directed killing of target cells, e.g., cancer cells, CD4⁺ T cell immunity, antigen-specific CD4⁺ T cell immunity, natural killer (NK) cell mediated killing of target cells, and the secretion of certain cytokines such as IL-2, INFN- [symbol] and TNF-α by T cells.

[0138] Again without wishing to be limited by a single hypothesis, PVRIG shows potentiating effects on the following immune functions: induction or differentiation and proliferation of inducible T regulatory or suppressor cells (iTregs). These cells are known to be involved in eliciting tolerance to self-antigens and to suppress anti-tumor immunity.

[0139] Again without wishing to be limited by a single hypothesis, PVRIG contributes to a non-functional phenotype of CD8 T cell from the tumor environment, also known as T cell exhaustion.

[0140] The flip side of immuno-oncology is the suppression of T cell activation in conditions where the immune system is too active, or is launching an immune response to an auto-antigen, etc. Thus, by providing PVRIG proteins (for example as fusion proteins, as discussed below), treatment of immune conditions such as auto-immune disease, inflammation and allergic diseases can be treated. That is, as PVRIG has an inhibitory effect on specific immune cells such as CD4⁺ T cells, CD8⁺ T cells or CTLs, and NK cells, which cells are known to be involved in the pathology of certain immune conditions such as autoimmune and inflammatory disorders, as well as eliciting a potentiating effect on Tregs or MDSCs, PVRIG polypeptides which potentiate or agonize the effects of PVRIG on immunity may optionally be used for treating conditions wherein the suppression of T cell or NK mediated immunity and/or the induction of immune tolerance or prolonged suppression of antigen-specific immunity is therapeutically desirable, e.g., the treatment of autoimmune, inflammatory or allergic conditions, and/or the suppression of undesired immune responses such as to cell or gene therapy, adverse immune responses during pregnancy, and adverse immune responses to transplanted heterologous, allogeneic or xenogeneic cells, organs and tissues and for inhibiting or preventing the onset of graft versus host disease (GVHD) after transplant.

[0141] Therefore, in one embodiment the present invention broadly relates to the development of novel “immunomodulatory proteins” wherein this includes PVRIG polypeptides that antagonize or block the effects of PVRIG on immunity and particularly the effects of PVRIG, on specific types of immune cells and cytokine production (i. e., “immunostimulatory PVRIG polypeptides or fusion proteins and/or immunostimulatory PVRIG antibodies”).

[0142] Additionally, the invention relates to PVRIG polypeptides that agonize or mimic the effects of PVRIG on immunity and particularly the effects of PVRIG on specific types of immune cells and cytokine production (i.e., “immunoinhibitory PVRIG polypeptides or fusion proteins”).

### II. PVRIG Mechanism of Action

[0143] Accordingly, as discussed herein, PVRIG is a immune checkpoint protein, sometimes referred to as “an immuno-oncology protein”. As has been shown for PD-1 and CTLA-4, among others, immune checkpoint proteins can be exploited in several ways, to either immunopotentiate the immune system to increase immune activity, such as through the activation of T cells for treatments of diseases such as cancer and infectious disease, or through immunoinhibition, where immunosuppression is desired, for example in allergic reactions, autoimmune diseases and inflammation. PVRIG as shown herein exhibits negative signaling on the immune system, by suppressing T cell activation and other pathways as outlined herein. Thus, by reducing the activity of PVRIG, for example by inhibiting its binding ability to its ligand such as PVLR2, the suppression is decreased and the immune system can be activated or stimulated to treat cancer, for example. Conversely, by increasing the activity of PVRIG (“stimulating” the activity with a “stimulator”), for example by adding additional PVRIG (a “stimulator of PVRIG”) to a host in the form of a soluble ECD (and optionally a fusion protein), the suppression is increased and the immune system is suppressed, allowing for treatment of diseases associated with increased immune function such as autoimmune diseases and others outlined herein.

[0144] As shown in the Example section, the expression of PVRIG has been positively correlated to expression of PD-1, a known immune checkpoint protein. Additionally, introduction of PVRIG (as over expressed on PBLs or as an Fc-fusion protein) was shown to inhibit the activation of T cells, as shown in the Examples, and KD of PVRIG in T cells was shown to increase the activation of T cells, and anti-PVRIG antibodies have been shown to activate T cells and NK cells.

[0145] Accordingly, the present invention is directed to compounds that either suppress the signaling pathway triggered by the binding interaction of PVRIG and PVLR2 (leading to increased T cell and NK cell activation, among other things, leading to treatment of diseases such as cancer and pathogen infection), or activate the signaling pathway triggered by the binding interaction of PVRIG and PVLR2 (leading to decreased T cell and NK cell activation, among other things), leading to treatment of diseases such as autoimmune diseases and inflammation.

[0146] Thus, specific mechanisms of action are provided for the immunostimulatory actions of, for example, anti-PVRIG antibodies, that are useful for increasing immune function, for example for the treatment of cancer. These include, but are not limited to, (i) increases in immune response, (ii) increases in activation of αβ and/or γδ T cells, (iii) increases in cytotoxic T cell activity, (iv) increases in NK and/or NKT cell activity, (v) alleviation of αβ and/or γδ T-cell suppression, (vi) increases in pro-inflammatory cytokine secretion, (vii) increases in IL-2 secretion; (viii) increases in interferon- [symbol] production, (ix) increases in Th1 response, (x) decreases in Th2 response, and (xi) decreases or eliminates cell number and/or activity of at least one of regulatory T cells (Tregs).

[0147] Furthermore, in some embodiments a PVRIG ECD (for example, in the form of an Fc fusion, for example) binds PVRL2 and interrupts one or more inhibitory signals (via PVRIG) and thus acts in an immunoinhibitory manner. These include, but are not limited to, (i) increases in immune response, (ii) increases in activation of αβ and/or γδ T cells, (iii) increases in cytotoxic T cell activity, (iv) increases in NK and/or NKT cell activity, (v) alleviation of αβ and/or γδ T-cell suppression, (vi) increases in pro-inflammatory cytokine secretion, (vii) increases in IL-2 secretion; (viii) increases in interferon- [symbol] production, (ix) increases in Th1 response, (x) decreases in Th2 response, (xi) decreases or eliminates cell number and/or activity of at least one of regulatory T cells (Tregs), (xii) reduces regulatory cell activity, and/or the activity of one or more of myeloid derived suppressor cells (MDSCs), iMCs, mesenchymal stromal cells, TIE2-expressing monocytes, (xiii) decreases or eliminates M2 macrophages, (xiv) reduces M2 macrophage pro-tumorigenic activity, (xv) decreases or eliminates N2 neutrophils, (xvi) reduces N2 neutrophils pro-tumorigenic activity, (xvii) reduces inhibition of T cell activation, (xviii) reduces inhibition of CTL activation, (xix) reduces inhibition of NK and/or NKT cell activation, (xx) reverses αβ and/or γδ T cell exhaustion, (xxi) increases αβ and/or γδ T cell response, (xxii) increases activity of cytotoxic cells, (xxiii) stimulates antigen-specific memory responses, (xxiv) elicits apoptosis or lysis of cancer cells, (xxv) stimulates cytotoxic or cytostatic effect on cancer cells, (xxvi) induces direct killing of cancer cells, (xxvii) increases Th17 activity and/or (xxviii) induces complement dependent cytotoxicity and/or antibody dependent cell-mediated cytotoxicity.

[0148] Additionally, specific mechanisms of action are provided for the immunoinhibitory actions of, for example, PVRIG ECD domains (including fusions, as are outlined herein), that are useful for decreasing immune function, for example for the treatment of autoimmune disease and inflammation. These include, but are not limited to, (i) decreases immune response, (ii) decreases αβ and/or γδ T cell activation, (iii) decreases cytotoxic T cell activity, (iv) decreases natural killer (NK) and/or NKT cell activity, (v) decreases αβ and/or γδ T-cell activity, (vi) decreases pro-inflammatory cytokine secretion, (vii) decreases IL-2 secretion; (viii) decreases interferon- [symbol] production, (ix) decreases Th1 response, (x) decreases increases Th2 response, (xvii) increases inhibition of T cell activation, (xviii) increases inhibition of CTL activation, (xix) increases inhibition of NK cell activation, (xx) increases αβ and/or γδ T cell exhaustion, (xxi) decreases αβ and/or γδ T cell response, (xxii) decreases activity of cytotoxic cells, (xxiii) reduces antigen-specific memory responses, (xxiv) inhibits apoptosis or lysis of cells, (xxv) decreases cytotoxic or cytostatic effect on cells, (xxvi) reduces direct killing of cells, (xxvii) decreases Th17 activity, and/or (xxviii) reduces complement dependent cytotoxicity and/or antibody dependent cell-mediated cytotoxicity.

### III. Methods of Screening

[0149] Accordingly, the present invention provides methods of screening for modulators of the PVRIG-PVLR2 interaction, which either leads to immunostimulation or immunoinhibition, as outlined herein. For example, compounds that inhibit the interaction of PVRIG and PVLR2, which normally leads to the suppression of T cell and/or NK cell activation and thus increase the immune response to allow for the ultimate administration to patients for the treatment of cancer and pathogen infections, for example. Conversely, compounds that increase the signaling due to the interaction of PVRIG and PVLR2, lead to increased suppression of T cell and/or NK cell activation, thus resulting in decreased immune responses, to allow for the ultimate administration to patients for the treatment of diseases associated with increased immune function such as autoimmune diseases and inflammation. In this latter case, the increase of signaling is termed “stimulation of binding”, which can be effected, for example, by adding a compound (a “stimulator”) such as the ECD of PVRIG, resulting in stimulated binding of the ECD to endogenous PVLR2 and triggering the signaling pathway.

[0150] A. Cell Based Assays

[0151] Accordingly, in one embodiment, the invention provides assays to screen for inhibitors of the binding association of PVRIG and PVLR2.

[0152] In one embodiment, the methods of screening provide cells that comprise an exogeneous recombinant nucleic acid encoding a human PVRIG protein, generally the full length protein including the transmembrane domain, such that the PVRIG protein is expressed in the correct orientation, resulting in the extracellular domain (ECD) being on the surface of the cell. By “exogeneous” in this context herein is meant that the gene (and any required expression vector sequences) is not endogeneous (naturally occurring in the genome) to the cell. In the case of non-human cell lines to be used in the assays herein, this means that the non-human cell line has a human gene transfected into the cell. In the case where human cell lines are used (preferable in most instances), and thus contain an endogeneous PVRIG gene, the cells contain at least an additional, recombinant human gene, if not additional copies as well.

[0153] In this embodiment, cells expressing exogeneous PVRIG are contacted with candidate agent(s) as is more fully outlined below, and a labeled PVLR2 protein (generally the ECD domain). By comparing the results to a reference standard not including the candidate agent, where binding is known to occur, the lack of bound label means the candidate agent binds to the PVRIG in such a way as to prevent PVLR2 binding.

[0154] In one embodiment, the methods are reversed, and thus use cells that comprise an exogeneous recombinant nucleic acid encoding a human PVLR2 protein, generally the full length protein including the transmembrane domain, such that the PVLR2 protein is expressed in the correct orientation, resulting in the extracellular domain (ECD) being on the surface of the cell.

[0155] In this embodiment, cells expressing exogeneous PVLR2 are contacted with candidate agent(s) as is more fully outlined below, and a labeled PVRIG protein (generally the ECD domain). By comparing the results to a reference standard not including the candidate agent, where binding is known to occur, the lack of bound label means the candidate agent binds to the PVLR2 in such a way as to prevent PVRIG binding.

[0156] As will be appreciated by those in the art, these assays can be done on surfaces such as in microtiter plates.

[0157] B. Support Based Assays

[0158] In one embodiment, the screening assay is a solid support assay, where one or the other of PVRIG and PVLR2 is attached, for example to a microtiter plate. Candidate agents and labeled proteins, e.g. the “other” of the PVRIG and PVLR2 is added. If the candidate agent blocks binding, this can be determined using the read out. For example, in one embodiment, PVRIG is attached to the solid support, generally at discrete locations. A candidate agent and PVLR2 is added, for example that is either directly labeled (for example with a fluorophore as outlined below), or indirectly labeled (for example using a labeled anti-PVLR2 antibody). After allowing a sufficient period of time and after washing, if the candidate agent blocks the interaction of PVRIG and PVLR2, no signal will be seen. If the agent does not, the signal will be generated and bound to the support. Similarly, this can be done using attachment of the PVLR2 to the solid support and adding labeled PVRIG and candidate agents.

[0159] C. FRET Based Assays

[0160] In some embodiments, this binding assay can be done using fluorescent resonance energy transfer (FRET) assays, as is well known in the art, where one of the receptor-ligand pair of PVRIG and PVLR2 has a FRET donor and the other has a FRET acceptor. Upon binding of the two, FRET occurs. If the candidate agent prevents binding, the FRET signal will be lost. This is also useful in competition assays, to determine whether the binding of the agent to PVRIG is stronger than the binding of PVLR2.

[0161] D. Functional Assays

[0162] These identified candidate agents that bind and block the interaction of the PVRIG and PVLR2 can then be further tested to see their effect on the signaling pathway. That is, the binding/blocking agents can be run in assays that measure T cell or NK cell activation, for example, to determine whether the blocking agents are immunostimulatory (increasing immune function such that diseases such as cancer can be treated) or immunoinhibitory (decreasing immune function to treat autoimmune diseases and inflammation).

[0163] In addition, the assays below can also be used to assess treatment efficacy, as is more further outlined below.

[0164] In some embodiments, the functional assay uses CTLs. The CTLs express a T cell receptor (TCR) recognizing a specific antigen (Ag) presented on an MEW molecule. Upon TCR Ag engagement, CTLs undergo activation as manifested by cell proliferation, up-regulation of activation markers (e.g. CD25, CD137 etc.), and cytokine secretion (e.g. interferon gamma, IL2, TNFsα etc.) and cytotoxic activity. Upon contact with PVRL2 expressed on cancer cells or antigen presenting cells, PVRIG mediates a negative signal to CTLs thereby causing down-regulation of CTL activation as manifested by the above readouts. Thus, contacting candidate agents that have shown binding and/or inhibition of receptor-ligand binding with CTLs will to interrupt the PVRIG-PVRL2 interaction and thereby release the negative signal mediated by PVRIG and enhances antigen specific CTL activation as manifested by cell proliferation, up-regulation of activation markers (e.g. CD25, CD137 etc.), and cytokine secretion (e.g. interferon gamma, IL2, TNF alfa etc.).

[0165] Similarly, in some embodiments, the functional assay uses NK cells. The NK cells express various activating and inhibitory receptors. The execution of NK cytotoxic activity is determined by the balance between the activatory and inhibitory signals derived from these receptors. Upon engagement of NK cells with certain target cells, NK cells undergo activation as manifested by cell proliferation, cytokine secretion (e.g. interferon gamma, IL2, TNF alfa etc.) and cytotoxic activity. Upon contact with PVRL2 expressed on cancer target cells, PVRIG mediates a negative signal to NK cells thereby causing down-regulation of NK cell activation as manifested by the above readouts. Contacting of candidate agents with NK cells will interrupt the PVRIG-PVRL2 interaction and thereby release the negative signal mediated by PVRIG and enhances NK cell activation as manifested by cell proliferation, cytokine secretion (e.g. interferon gamma, IL2, TNF alfa etc.) and cytotoxic activity.

[0166] In one embodiment, the signaling pathway assay measures increases or decreases in immune response as measured for an example by phosphorylation or de-phosphorylation of different factors, or by measuring other post translational modifications. An increase in activity indicates immunostimulatory activity and a decrease indicates immunoinhibitory activity. Appropriate increases or decreases in activity are outlined below.

[0167] In one embodiment, the signaling pathway assay measures increases or decreases in activation of αβ and/or γδ T cells as measured for an example by cytokine secretion or by proliferation or by changes in expression of activation markers like for an example CD137, CD107a, PD1, etc. An increase in activity indicates immunostimulatory activity and a decrease indicates immunoinhibitory activity. Appropriate increases or decreases in activity are outlined below.

[0168] In one embodiment, the signaling pathway assay measures increases or decreases in cytotoxic T cell activity as measured for an example by direct killing of target cells like for an example cancer cells or by cytokine secretion or by proliferation or by changes in expression of activation markers like for an example CD137, CD107a, PD1, etc. An increase in activity indicates immunostimulatory activity and a decrease indicates immunoinhibitory activity. Appropriate increases or decreases in activity are outlined below.

[0169] In one embodiment, the signaling pathway assay measures increases or decreases in NK and/or NKT cell activity as measured for an example by direct killing of target cells like for an example cancer cells or by cytokine secretion or by changes in expression of activation markers like for an example CD107a, etc. An increase in activity indicates immunostimulatory activity and a decrease indicates immunoinhibitory activity. Appropriate increases or decreases in activity are outlined below.

[0170] In one embodiment, the signaling pathway assay measures increases or decreases in αβ and/or γδ T-cell suppression. as measured for an example by cytokine secretion or by proliferation or by changes in expression of activation markers like for an example CD137, CD107a, PD1, etc. An increase in activity indicates immunostimulatory activity and a decrease indicates immunoinhibitory activity. Appropriate increases or decreases in activity are outlined below.

[0171] In one embodiment, the signaling pathway assay measures increases or decreases in pro-inflammatory cytokine secretion as measured for example by ELISA or by Luminex or by Multiplex bead based methods or by intracellular staining and FACS analysis or by Alispot etc. An increase in activity indicates immunostimulatory activity and a decrease indicates immunoinhibitory activity. Appropriate increases or decreases in activity are outlined below.

[0172] In one embodiment, the signaling pathway assay measures increases or decreases in IL-2 secretion as measured for example by ELISA or by Luminex or by Multiplex bead based methods or by intracellular staining and FACS analysis or by Alispot etc. An increase in activity indicates immunostimulatory activity and a decrease indicates immunoinhibitory activity.

[0173] In one embodiment, the signaling pathway assay measures increases or decreases in interferon- [symbol] production as measured for example by ELISA or by Luminex or by Multiplex bead based methods or by intracellular staining and FACS analysis or by Alispot etc. An increase in activity indicates immunostimulatory activity and a decrease indicates immunoinhibitory activity. Appropriate increases or decreases in activity are outlined below.

[0174] In one embodiment, the signaling pathway assay measures increases or decreases in Th1 response as measured for an example by cytokine secretion or by changes in expression of activation markers. An increase in response indicates immunostimulatory activity and a decrease indicates immunoinhibitory activity. Appropriate increases or decreases in activity are outlined below.

[0175] In one embodiment, the signaling pathway assay measures increases or decreases in Th2 response as measured for an example by cytokine secretion or by changes in expression of activation markers. An increase in response indicates immunostimulatory activity and a decrease indicates immunoinhibitory activity. Appropriate increases or decreases in activity are outlined below.

[0176] In one embodiment, the signaling pathway assay measures increases or decreases cell number and/or activity of at least one of regulatory T cells (Tregs), as measured for example by flow cytometry or by IHC. A decrease in response indicates immunostimulatory activity and an increase indicates immunoinhibitory activity. Appropriate increases or decreases in activity are outlined below.

[0177] In one embodiment, the signaling pathway assay measures increases or decreases in M2 macrophages cell numbers, as measured for example by flow cytometry or by IHC. A decrease in response indicates immunostimulatory activity and a increase indicates immunoinhibitory activity. Appropriate increases or decreases in activity are outlined below.

[0178] In one embodiment, the signaling pathway assay measures increases or decreases in M2 macrophage pro-tumorigenic activity, as measured for an example by cytokine secretion or by changes in expression of activation markers. A decrease in response indicates immunostimulatory activity and a increase indicates immunoinhibitory activity.

[0179] In one embodiment, the signaling pathway assay measures increases or decreases in N2 neutrophils increase, as measured for example by flow cytometry or by IHC. A decrease in response indicates immunostimulatory activity and a increase indicates immunoinhibitory activity. Appropriate increases or decreases in activity are outlined below.

[0180] In one embodiment, the signaling pathway assay measures increases or decreases in N2 neutrophils pro-tumorigenic activity, as measured for an example by cytokine secretion or by changes in expression of activation markers. A decrease in response indicates immunostimulatory activity and a increase indicates immunoinhibitory activity. Appropriate increases or decreases in activity are outlined below.

[0181] In one embodiment, the signaling pathway assay measures increases or decreases in inhibition of T cell activation, as measured for an example by cytokine secretion or by proliferation or by changes in expression of activation markers like for an example CD137, CD107a, PD1, etc. An increase in response indicates immunostimulatory activity and a decrease indicates immunoinhibitory activity. Appropriate increases or decreases in activity are outlined below.

[0182] In one embodiment, the signaling pathway assay measures increases or decreases in inhibition of CTL activation as measured for an example by direct killing of target cells like for an example cancer cells or by cytokine secretion or by proliferation or by changes in expression of activation markers like for an example CD137, CD107a, PD1, etc. An increase in response indicates immunostimulatory activity and a decrease indicates immunoinhibitory activity. Appropriate increases or decreases in activity are outlined below.

[0183] In one embodiment, the signaling pathway assay measures increases or decreases in αβ and/or γδ T cell exhaustion as measured for an example by changes in expression of activation markers. A decrease in response indicates immunostimulatory activity and a increase indicates immunoinhibitory activity. Appropriate increases or decreases in activity are outlined below.

[0184] In one embodiment, the signaling pathway assay measures increases or decreases and/or γδ T cell response as measured for an example by cytokine secretion or by proliferation or by changes in expression of activation markers like for an example CD137, CD107a, PD1, etc. An increase in activity indicates immunostimulatory activity and a decrease indicates immunoinhibitory activity. Appropriate increases or decreases in activity are outlined below.

[0185] In one embodiment, the signaling pathway assay measures increases or decreases in stimulation of antigen-specific memory responses as measured for an example by cytokine secretion or by proliferation or by changes in expression of activation markers like for an example CD45RA, CCR7 etc. An increase in activity indicates immunostimulatory activity and a decrease indicates immunoinhibitory activity. Appropriate increases or decreases in activity are outlined below.

[0186] In one embodiment, the signaling pathway assay measures increases or decreases in apoptosis or lysis of cancer cells as measured for an example by cytotoxicity assays such as for an example MTT, Cr release, Calcine AM, or by flow cytometry based assays like for an example CFSE dilution or propidium iodide staining etc. An increase in activity indicates immunostimulatory activity and a decrease indicates immunoinhibitory activity. Appropriate increases or decreases in activity are outlined below.

[0187] In one embodiment, the signaling pathway assay measures increases or decreases in stimulation of cytotoxic or cytostatic effect on cancer cells. as measured for an example by cytotoxicity assays such as for an example MTT, Cr release, Calcine AM, or by flow cytometry based assays like for an example CF SE dilution or propidium iodide staining etc. An increase in activity indicates immunostimulatory activity and a decrease indicates immunoinhibitory activity. Appropriate increases or decreases in activity are outlined below.

[0188] In one embodiment, the signaling pathway assay measures increases or decreases direct killing of cancer cells as measured for an example by cytotoxicity assays such as for an example MTT, Cr release, Calcine AM, or by flow cytometry based assays like for an example CFSE dilution or propidium iodide staining etc. An increase in activity indicates immunostimulatory activity and a decrease indicates immunoinhibitory activity. Appropriate increases or decreases in activity are outlined below.

[0189] In one embodiment, the signaling pathway assay measures increases or decreases Th17 activity as measured for an example by cytokine secretion or by proliferation or by changes in expression of activation markers. An increase in activity indicates immunoinhibitory activity and a decrease indicates immunostimulatory activity. Appropriate increases or decreases in activity are outlined below.

[0190] In one embodiment, the signaling pathway assay measures increases or decreases in induction of complement dependent cytotoxicity and/or antibody dependent cell-mediated cytotoxicity, as measured for an example by cytotoxicity assays such as for an example MTT, Cr release, Calcine AM, or by flow cytometry based assays like for an example CFSE dilution or propidium iodide staining etc. An increase in activity indicates immunostimulatory activity and a decrease indicates immunoinhibitory activity. Appropriate increases or decreases in activity are outlined below.

[0191] In one embodiment, the assay measures increases or decreases in cell proliferation as a function of activation or inhibition, using well known methodologies such as thymidine incorporation and CF SE dilution.

[0192] Appropriate increases in activity or response (or decreases, as appropriate as outlined above), are increases of 10%, 20%, 30%, 40%, 50%, 60%, 70%, 80%, 90%, 95% or 98 to 99% percent over the signal in either a reference sample or in control samples, for example test samples that do not contain an anti-PVRIG antibody of the invention. Similarly, increases of at least one-, two-, three-, four- or five-fold as compared to reference or control samples show efficacy.

[0193] E. Candidate Agents

[0194] The assays are run by contacting candidate agents with the PVRIG and PVLR2 proteins. By “candidate agent”, “candidate bioactive agent” or “candidate drugs” or grammatical equivalents herein is meant any molecule, e.g. proteins (which herein includes proteins, polypeptides, and peptides), small organic or inorganic molecules, polysaccharides, polynucleotides, etc. which are to be tested for binding to PVRIG, inhibition of the PVRIG-PVLR2 interaction, or activation of PVRIG. Candidate agents encompass numerous chemical classes. In a preferred embodiment, the candidate agents are organic molecules, particularly small organic molecules, comprising functional groups necessary for structural interaction with proteins, particularly hydrogen bonding, and typically include at least an amine, carbonyl, hydroxyl or carboxyl group, preferably at least two of the functional chemical groups. The candidate agents often comprise cyclical carbon or heterocyclic structures and/or aromatic or polyaromatic structures substituted with one or more chemical functional groups.

[0195] Candidate agents are obtained from a wide variety of sources, as will be appreciated by those in the art, including libraries of synthetic or natural compounds. As will be appreciated by those in the art, the present invention provides a rapid and easy method for screening any library of candidate agents, including the wide variety of known combinatorial chemistry-type libraries.

[0196] In a preferred embodiment, candidate agents are synthetic compounds. Any number of techniques are available for the random and directed synthesis of a wide variety of organic compounds and biomolecules, including expression of randomized oligonucleotides.

[0197] Alternatively, a preferred embodiment utilizes libraries of natural compounds in the form of bacterial, fungal, plant and animal extracts that are available or readily produced.

[0198] Additionally, natural or synthetically produced libraries and compounds are readily modified through conventional chemical, physical and biochemical means. Known pharmacological agents may be subjected to directed or random chemical modifications, including enzymatic modifications, to produce structural analogs.

[0199] In a preferred embodiment, candidate bioactive agents include proteins, nucleic acids, and chemical moieties.

[0200] In a preferred embodiment, the candidate bioactive agents are proteins. By “protein” herein is meant at least two covalently attached amino acids, which includes proteins, polypeptides, oligopeptides and peptides. The protein may be made up of naturally occurring amino acids and peptide bonds, or synthetic peptidomimetic structures. Thus “amino acid”, or “peptide residue”, as used herein means both naturally occurring and synthetic amino acids. For example, homo-phenylalanine, citrulline and noreleucine are considered amino acids for the purposes of the invention. “Amino acid” also includes imino acid residues such as proline and hydroxyproline. The side chains may be in either the (R) or the (S) configuration. In the preferred embodiment, the amino acids are in the (S) or L-configuration. If non-naturally occurring side chains are used, non-amino acid substituents may be used, for example to prevent or retard in vivo degradations.

[0201] In a preferred embodiment, the candidate bioactive agents are naturally occurring proteins or fragments of naturally occurring proteins. Thus, for example, cellular extracts containing proteins, or random or directed digests of proteinaceous cellular extracts, may be attached to beads as is more fully described below. In this way libraries of procaryotic and eucaryotic proteins may be made for screening against any number of targets. Particularly preferred in this embodiment are libraries of bacterial, fungal, viral, and mammalian proteins, with the latter being preferred, and human proteins being especially preferred.

[0202] In many embodiments, the candidate agents are antibodies to PVRIG, generated as is known in the art and outlined herein.

[0203] In many embodiments, the candidate agents are ECDs of PVRIG, including fusion proteins and variants, as is known in the art and more fully outlined herein.

[0204] In a preferred embodiment, the candidate bioactive agents are peptides of from about 2 to about 50 amino acids, with from about 5 to about 30 amino acids being preferred, and from about 8 to about 20 being particularly preferred. The peptides may be digests of naturally occuring proteins as is outlined above, random peptides, or “biased” random peptides. By “randomized” or grammatical equivalents herein is meant that each nucleic acid and peptide consists of essentially random nucleotides and amino acids, respectively. Since generally these random peptides (or nucleic acids, discussed below) are chemically synthesized, they may incorporate any nucleotide or amino acid at any position. The synthetic process can be designed to generate randomized proteins or nucleic acids, to allow the formation of all or most of the possible combinations over the length of the sequence, thus forming a library of randomized candidate bioactive proteinaceous agents.

[0205] The library should provide a sufficiently structurally diverse population of randomized agents to effect a probabilistically sufficient range of diversity to allow binding to a particular target. Accordingly, an interaction library must be large enough so that at least one of its members will have a structure that gives it affinity for the target. Although it is difficult to gauge the required absolute size of an interaction library, nature provides a hint with the immune response: a diversity of 10⁷-10⁸ different antibodies provides at least one combination with sufficient affinity to interact with most potential antigens faced by an organism. Published in vitro selection techniques have also shown that a library size of 10⁷ to 10⁸ is sufficient to find structures with affinity for the target. A library of all combinations of a peptide 7 to 20 amino acids in length, such as generally proposed herein, has the potential to code for 20⁷ (10⁹) to 20²⁰. Thus, with libraries of 10⁷ to 10⁸ different molecules the present methods allow a “working” subset of a theoretically complete interaction library for 7 amino acids, and a subset of shapes for the 20²⁰ library. Thus, in a preferred embodiment, at least 10⁶, preferably at least 10⁷, more preferably at least 10⁸ and most preferably at least 10⁹ different sequences are simultaneously analyzed in the subject methods. Preferred methods maximize library size and diversity.

[0206] In one embodiment, the library is fully randomized, with no sequence preferences or constants at any position. In a preferred embodiment, the library is biased. That is, some positions within the sequence are either held constant, or are selected from a limited number of possibilities. For example, in a preferred embodiment, the nucleotides or amino acid residues are randomized within a defined class, for example, of hydrophobic amino acids, hydrophilic residues, sterically biased (either small or large) residues, towards the creation of cysteines, for cross-linking, prolines for SH-3 domains, serines, threonines, tyrosines or histidines for phosphorylation sites, etc., or to purines, etc.

### IV. PVRIG Proteins

[0207] The present invention is directed to the use of human Poliovirus Receptor Related Immunoglobulin Domain Containing Protein, or “PVRIG”, sometimes also referred to herein as “PV protein”, including fragments (including ECDs) as outlined below. The present invention provides PVRIG proteins. “Protein” in this context is used interchangeably with “polypeptide”, and includes peptides as well. PVRIG is a transmembrane domain protein of 326 amino acids in length, with a signal peptide (spanning from amino acid 1 to 40), an extracellular domain (spanning from amino acid 41 to 171), a transmembrane domain (spanning from amino acid 172 to 190) and a cytoplasmic domain (spanning from amino acid 191 to 326). The full length human PVRIG protein is shown in FIG. 25. There are two methionines that can be start codons, but the mature proteins are identical.

[0208] The full length PVRIG protein is shown in FIG. 25, and the wild type has a variety of putative splice variants, some of which are shown in FIGS. 104A and 104B.

[0209] Accordingly, as used herein, the term “PVRIG” or “PVRIG protein” or “PVRIG polypeptide” may optionally include any such protein, or variants, conjugates, or fragments thereof, including but not limited to known or wild type PVRIG, as described herein, including but not limited to those depicted in FIGS. 104A and 104B. In addition, there are some PVRIG ECD amino acid variants shown in FIGS. 103A-103BX, that also find use in the present invention.

[0210] Included in the invention are the sequences shown in FIGS. 67, FIG. 91 and FIG. 92, as well as variants thereof possessing at least 80% sequence identity, more preferably at least 90% sequence identity therewith and even more preferably at least 95, 96, 97, 98 or 99% sequence identity therewith, and/or fusions and or conjugates thereof, and/or polynucleotides encoding same.

[0211] The term “soluble” form of PVRIG is also used interchangeably with the terms “soluble ectodomain (ECD)” or “ectodomain” or “extracellular domain (ECD)” as well as “fragments of PVRIG polypeptides”, which may refer broadly to one or more of the sequences shown in FIG. 67, FIG. 91 and FIG. 92.

[0212] In particular, the fragments of the extracellular domain of PVRIG can include any sequence corresponding to any portion of or comprising the Ig domain of the extracellular domain of PVRIG, having any sequence corresponding to residues of PVRIG (shown in FIG. 26) starting from any position between 21 and 25 and ending at any position between 124 and 128.

[0213] The PVRIG proteins contain an immunoglobulin (Ig) domain within the extracellular domain, which is a PVR-like Ig fold domain. The PVR-like Ig fold domain may be responsible for functional counterpart binding, by analogy to the other B7 family members. The PVR-like Ig fold domain of the extracellular domain includes one disulfide bond formed between intra domain cysteine residues, as is typical for this fold and may be important for structure-function. In SEQ ID NO: 3 these cysteines are located at residues 22 and 93 (or 94). In one embodiment, there is provided a soluble fragment of PVRIG; as described in greater detail below with regard to the section on fusion proteins, such a soluble fragment may optionally be described as a first fusion partner. Useful fragments are those that alone or when comprised in fusion proteins or multimerized retain the ability to bind to their natural molecular partner or partners, e.g., expressed on antigen presenting, T and NK cells, and/or which modulate (inhibit or promote) T cell and/or NK cell activation. A PVRIG polypeptide that is a fragment of full-length PVRIG typically has at least 20 percent, 30 percent, 40 percent, 50 percent, 60 percent, 70 percent, 80 percent, 90 percent, 95 percent, 98 percent, 99 percent, 100 percent, or even more than 100 percent of the ability to bind its natural molecular partner(s) and/or the modulation (agonism or antagonism) of one or more of the functional effects of PVRIG on immunity and on specific immune cells as compared to full-length PVRIG. Soluble PVRIG polypeptide fragments are fragments of PVRIG polypeptides that may be shed, secreted or otherwise extracted from the producing cells. In other embodiments, the soluble fragments of PVRIG polypeptides include fragments of the PVRIG extracellular domain that retain PVRIG biological activity, such as fragments that retain the ability to bind to their natural functional counterpart(s) and/or which modulate (inhibit or promote) T or NK cell activation. The extracellular domain can include 1, 2, 3, 4, or 5 contiguous amino acids from the transmembrane domain, and/or 1, 2, 3, 4, or 5 contiguous amino acids from the signal sequence. Alternatively, the extracellular domain can have 1, 2, 3, 4, 5 or more amino acids removed from the C-terminus, N-terminus, or both.

[0214] In some embodiments the PVRIG extracellular domain polypeptide comprises the amino acid sequence of the PVR-like Ig fold domain as set forth in FIGS. 104A-104B, or fragments or variants thereof. In other embodiments the PVRIG extracellular domain polypeptide consists essentially of the amino acid sequence of the PVR-like Ig fold domain as set forth in FIGS. 104A-104B.

[0215] Optionally, the PVRIG fragments refer also to any one of the polypeptide sequences listed in FIG. 67 and FIG. 92, which are reasonably expected to comprise functional regions of the PVRIG protein. This expectation is based on a systematic analysis of a set of protein complexes with solved 3d structures, which contained complexes of Ig proteins (for example PDB id 1i85 which describe the complex of CTLA4 and CD86). The intermolecular contact residues from each “co-structure” from each PDB were collected and projected on the sequence of PVRIG. Several regions with clusters of interacting residues supported by several contact maps were identified and synthesized as a series of peptides and are reasonably expected to mimic the structure of the intact full length protein and thereby modulate one or more of the effects of PVRIG on immunity and on specific immune cell types. According to at least some embodiments of the invention, the the PVRIG ECD fragments represented by polypeptide sequences listed in FIG. 67, are located as follows (as compared to human PVRIG ECD of FIG. 25, counting from the first amino acid of the ECD): PVRIG Fragment A is located at positions 46 to 66; PVRIG Fragment B is located at positions 46 to 79; PVRIG Fragment C is located at positions 63 to 79; PVRIG Fragment D is located at positions 91 to 106; PVRIG Fragment E is located at positions 91 to 114; PVRIG Fragment F is located at positions 11 to 25; PVRIG Fragment G is located at positions 3 to 24; PVRIG Fragment H is located at positions 18 to 36; PVRIG Fragment I is located at positions 29 to 52; PVRIG Fragment J is located at positions 73-98.

[0216] Generally, the PVRIG polypeptide fragments are expressed from nucleic acids that include sequences that encode a signal sequence. The signal sequence is generally cleaved from the immature polypeptide to produce the mature polypeptide lacking the signal sequence. The signal sequence of PVRIG can be replaced by the signal sequence of another polypeptide using standard molecule biology techniques to affect the expression levels, secretion, solubility, or other property of the polypeptide. The signal peptide sequence that is used to replace the PVRIG signal peptide sequence can be any known in the art.

### V. PVRIG Fusion Proteins

[0217] In some embodiments, the invention uses PVRIG polypeptides in the form of fusion proteins, wherein the PVRIG polypeptide (generally an ECD) is fused, recombinantly in frame to a fusion partner.

[0218] A. Fusion Partners

[0219] In many embodiments, the PVRIG polypeptide is fused to a “fusion partner” (also referred to herein as a “fusion partner moiety”), either directly or indirectly through the use of a linker as is more fully described below. As will be appreciated by those in the art, the fusion partner can be any moiety that is fused to the PVRIG polypeptide for any number of biochemical and/or biological reasons. In some embodiments, the fusion partner moiety increases the half life of the PVRIG fusion protein as is described below. In some embodiments, the fusion partner moiety adds an additional biologic or biochemical function to the PVRIG polypeptide.

[0220] In some embodiments, the fusion partner is generally linked at either the N-terminus or the C-terminus of the PVRIG polypeptide, optionally using a linker as described herein, such that the fusion protein has a formula selected from the group consisting of NH2-PVRIG polypeptide-fusion partner-COOH, PVRIG polypeptide, NH2-fusion partner-L-PVRIG polypeptide-COOH, and NH2-fusion partner-PVRIG polypeptide-COOH.

[0221] 1. HSA

[0222] In some embodiments, the PVRIG fusion partner is a human serum albumin (HSA), as is known in the art. In particular, fusions to HSA are known to increase serum half life of the fusion protein, as compared to the protein itself. These can include standard flexible linkers such as described herein and shown in FIG. 107.

[0223] 2. Fc Domains

[0224] In some embodiments, the PVRIG polypeptide is fused to a fusion partner that is an Fc domain. By “Fc domain” herein is meant the CH2-CH3 domains of an antibody, as is known in the art, optionally including some or all of the hinge region residues. The Fc domain is generally derived from a human IgG protein, generally IgG1, IgG2, IgG3 or IgG4, the sequences of which are shown in FIGS. 66A-66C. The choice of Fc domain may depend on whether effector function is desired (e.g. such that IgG1 is chosen), or not (IgG2 and IgG4, for example).

[0225] In addition, there are a number of Fc domain variants that can be optionally and independently included as amino acid substitutions. By “amino acid substitution” or “substitution” herein is meant the replacement of an amino acid at a particular position in a parent polypeptide sequence with a different amino acid. In particular, in some embodiments, the substitution is to an amino acid that is not naturally occurring at the particular position, either not naturally occurring within the organism or in any organism. For example, the substitution E272Y refers to a variant polypeptide, in this case an Fc variant, in which the glutamic acid at position 272 is replaced with tyrosine. For clarity, a protein which has been engineered to change the nucleic acid coding sequence but not change the starting amino acid (for example exchanging CGG (encoding arginine) to CGA (still encoding arginine) to increase host organism expression levels) is not an “amino acid substitution”; that is, despite the creation of a new gene encoding the same protein, if the protein has the same amino acid at the particular position that it started with, it is not an amino acid substitution.

[0226] In some embodiments, amino acid substitutions can be made in the Fc region, in general for altering binding to FcγR receptors. By “Fc gamma receptor”, “FcγR” or “FcgammaR” as used herein is meant any member of the family of proteins that bind the IgG antibody Fc region and is encoded by an FcγR gene. In humans this family includes but is not limited to FcγRI (CD64), including isoforms FcγRIa, FcγRIb, and FcγRIc; FcγRII (CD32), including isoforms FcγRIIa (including allotypes H131 and R131), FcγRIIb (including FcγRIIb-1 and FcγRIIb-2), and FcγRIIc; and FcγRIII (CD16), including isoforms FcγRIIIa (including allotypes V158 and F158) and FcγRIIIb (including allotypes FcγRIIIb-NA1 and FcγRIIIb-NA2) (Jefferis et al., 2002, Immunol Lett 82:57-65, entirely incorporated by reference), as well as any undiscovered human FcγRs or FcγR isoforms or allotypes. An FcγR may be from any organism, including but not limited to humans, mice, rats, rabbits, and monkeys. Mouse FcγRs include but are not limited to FcγRI (CD64), FcγRII (CD32), FcγRIII-1 (CD16), and FcγRIII-2 (CD16-2), as well as any undiscovered mouse FcγRs or FcγR isoforms or allotypes.

[0227] There are a number of useful Fc substitutions that can be made to alter binding to one or more of the FcγR receptors. Substitutions that result in increased binding as well as decreased binding can be useful. For example, it is known that increased binding to FcγRIIIa generally results in increased ADCC (antibody dependent cell-mediated cytotoxicity; the cell-mediated reaction wherein nonspecific cytotoxic cells that express FcγRs recognize bound antibody on a target cell and subsequently cause lysis of the target cell. Similarly, decreased binding to FcγRIIb (an inhibitory receptor) can be beneficial as well in some circumstances. Amino acid substitutions that find use in the present invention include those listed in U.S. Ser. No. 11/124,620 (particularly FIG. 41) and U.S. Pat. No. 6,737,056, both of which are expressly incorporated herein by reference in their entirety and specifically for the variants disclosed therein. Particular variants that find use include, but are not limited to, 236A, 239D, 239E, 332E, 332D, 239D/332E, 267D, 267E, 328F, 267E/328F, 236A/332E, 239D/332E/330Y, 239D, 332E/330L, 299T and 297N.

[0228] In addition, the antibodies of the invention are modified to increase its biological half-life. Various approaches are possible. For example, one or more of the following mutations can be introduced: T252L, T254S, T256F, as described in U.S. Pat. No. 6,277,375 to Ward. Alternatively, to increase the biological half-life, the antibody can be altered within the C_{H1} or C_{L} region to contain a salvage receptor binding epitope taken from two loops of a CH2 domain of an Fc region of an IgG, as described in U.S. Pat. Nos. 5,869,046 and 6,121,022 by Presta et al. Additional mutations to increase serum half life are disclosed in U.S. Pat. Nos. 8,883,973, 6,737,056 and 7,371,826, and include 428L, 434A, 434S, and 428L/434S.

[0229] In yet other embodiments, the Fc region is altered by replacing at least one amino acid residue with a different amino acid residue to alter the effector functions of the antibody. For example, one or more amino acids selected from amino acid residues 234, 235, 236, 237, 297, 318, 320 and 322 can be replaced with a different amino acid residue such that the antibody has an altered affinity for an effector ligand but retains the antigen-binding ability of the parent antibody. The effector ligand to which affinity is altered can be, for example, an Fc receptor or the C1 component of complement. This approach is described in further detail in U.S. Pat. Nos. 5,624,821 and 5,648,260, both by Winter et al.

[0230] In another example, one or more amino acids selected from amino acid residues 329, 331 and 322 can be replaced with a different amino acid residue such that the antibody has altered C1q binding and/or reduced or abolished complement dependent cytotoxicity (CDC). This approach is described in further detail in U.S. Pat. No. 6,194,551 by Idusogie et al.

[0231] In another example, one or more amino acid residues within amino acid positions 231 and 239 are altered to thereby alter the ability of the antibody to fix complement. This approach is described further in PCT Publication WO 94/29351 by Bodmer et al.

[0232] In yet another example, the Fc region is modified to increase the ability of the antibody to mediate antibody dependent cellular cytotoxicity (ADCC) and/or to increase the affinity of the antibody for an Fc [symbol] receptor by modifying one or more amino acids at the following positions: 238, 239, 248, 249, 252, 254, 255, 256, 258, 265, 267, 268, 269, 270, 272, 276, 278, 280, 283, 285, 286, 289, 290, 292, 293, 294, 295, 296, 298, 301, 303, 305, 307, 309, 312, 315, 320, 322, 324, 326, 327, 329, 330, 331, 333, 334, 335, 337, 338, 340, 360, 373, 376, 378, 382, 388, 389, 398, 414, 416, 419, 430, 434, 435, 437, 438 or 439. This approach is described further in PCT Publication WO 00/42072 by Presta. Moreover, the binding sites on human IgG1 for Fc [symbol] RI, Fc [symbol] RII, Fc [symbol] RIII and FcRn have been mapped and variants with improved binding have been described (see Shields, R. L. et al. (2001) J. Biol. Chem. 276:6591-6604). Specific mutations at positions 256, 290, 298, 333, 334 and 339 are shown to improve binding to FcyRIII. Additionally, the following combination mutants are shown to improve Fc [symbol] RIII binding: T256A/S298A, S298A/E333A, S298A/K224A and S298A/E333A/K334A. Furthermore, mutations such as M252Y/S254T/T256E or M428L/N434S improve binding to FcRn and increase antibody circulation half-life (see Chan CA and Carter PJ (2010) Nature Rev Immunol 10:301-316).

[0233] In still another embodiment, the glycosylation of an Fc domain is modified. For example, an aglycosylated Fc domain can be made (i.e., the antibody lacks glycosylation). Glycosylation can be altered to, for example, increase the affinity of the antibody for antigen or reduce effector function such as ADCC. Such carbohydrate modifications can be accomplished by, for example, altering one or more sites of glycosylation within the antibody sequence, for example N297. For example, one or more amino acid substitutions can be made that result in elimination of one or more variable region framework glycosylation sites to thereby eliminate glycosylation at that site.

[0234] Additionally or alternatively, an Fc domain can be made that has an altered type of glycosylation, such as a hypofucosylated antibody having reduced amounts of fucosyl residues or an Fc domain having increased bisecting GlcNac structures. Such altered glycosylation patterns have been demonstrated to increase the ADCC ability of antibodies. Such carbohydrate modifications can be accomplished by, for example, expressing the antibody in a host cell with altered glycosylation machinery. Cells with altered glycosylation machinery have been described in the art and can be used as host cells in which to express recombinant antibodies according to at least some embodiments of the invention to thereby produce an antibody with altered glycosylation. For example, the cell lines Ms704, Ms705, and Ms709 lack the fucosyltransferase gene, FUT8 (α(1,6) fucosyltransferase), such that antibodies expressed in the Ms704, Ms705, and Ms709 cell lines lack fucose on their carbohydrates. The Ms704, Ms705, and Ms709 FUT8 cell lines are created by the targeted disruption of the FUT8 gene in CHO/DG44 cells using two replacement vectors (see U.S. Patent Publication No. 20040110704 by Yamane et al. and Yamane-Ohnuki et al. (2004) Biotechnol Bioeng 87:614-22). As another example, EP 1,176,195 by Hanai et al. describes a cell line with a functionally disrupted FUT8 gene, which encodes a fucosyl transferase, such that antibodies expressed in such a cell line exhibit hypofucosylation by reducing or eliminating the α 1,6 bond-related enzyme. Hanai et al. also describe cell lines which have a low enzyme activity for adding fucose to the N-acetylglucosamine that binds to the Fc region of the antibody or does not have the enzyme activity, for example the rat myeloma cell line YB2/0 (ATCC CRL 1662). PCT Publication WO 03/035835 by Presta describes a variant CHO cell line, Lec13 cells, with reduced ability to attach fucose to Asn(297)-linked carbohydrates, also resulting in hypofucosylation of antibodies expressed in that host cell (see also Shields, R. L. et al. (2002) J. Biol. Chem. 277:26733-26740). PCT Publication WO 99/54342 by Umana et al. describes cell lines engineered to express glycoprotein-modifying glycosyl transferases (e.g., β(1,4)-N-acetylglucosaminyltransferase III (GnTIII)) such that antibodies expressed in the engineered cell lines exhibit increased bisecting GlcNac structures which results in increased ADCC activity of the antibodies (see also Umana et al. (1999) Nat. Biotech. 17:176-180). Alternatively, the fucose residues of the antibody may be cleaved off using a fucosidase enzyme. For example, the fucosidase α-L-fucosidase removes fucosyl residues from antibodies (Tarentino, A. L. et al. (1975) Biochem. 14:5516-23).

[0235] 3. Polyethylene Glycol Fusion Partners

[0236] In some embodiments, the fusion partner moiety is one or more polyethylene glycol (PEG) moieties. As is well known in the art, the modification of therapeutic protein drugs, such as erythropoietin, GM-CSF, interferon alpha and beta and human growth hormone, is frequently done to increase to alter a number of pharmacological properties, including, but not limited to, increased solubility, extended serum half-life, decreased dosage frequency, increased stability, decreased immunogenicity and enhanced protection from proteases.

[0237] As is known in the art, generally a number of PEG molecules are “loaded” onto each protein, depending on a number of factors, and the PEG molecules may be of varying length.

[0238] In general, the PEG moieties are covalently attached directly to the amino acid side chains of the PVRIG polypeptide, using activated PEG derivatives as is well known in the art. That is, generally no additional linkers are used, e.g. there are no extra atoms between the PEG and the amino acid side chain. In other embodiments, linkers such as those outlined below are used.

[0239] 4. Additional Heterologous Fusion Partners

[0240] In addition to half life extension fusion partner moieties, PVRIG polypeptides can be fused (generally but optionally using linkers as outlined herein), with heterologous polypeptide that give additional biochemical functionalities to the PVRIG polypeptides. These heterologous fusion partner moieties including, but are not limited to, receptors, hormones, cytokines, antigens, B-cell targets, NK cell targets, T cell targets, TNF receptor superfamily members, Hedgehog family members, a receptor tyrosine kinases, a proteoglycan-related molecules, a TGF-β superfamily members, Wnt-related molecules, receptor ligands, dendritic cell targets, myeloid cell targets, monocyte/macrophage cell targets or angiogenesis targets.

[0241] In some embodiments, the fusion partner is a T cell target selected from the group consisting of 2B4/SLAMF4, IL-2 Rα, 4-1BB/TNFRSF9, IL-2Rβ, ALCAM, B7-1/CD80, IL-4R, B7-H3, BLAME/SLAMF8, BTLA, IL-6R, CCR3, IL-7 Ra, CCR4, CXCR1/IL-8 RA, CCR5, CCR6, IL-10 R α, CCR7, IL-10 Rβ, CCR8, IL-12 Rβ1, CCR9, IL-12 Rβ 2, CD2, IL-13Rα1, IL-13, CD3, CD4, ILT2/CD85j, ILT3/CD85k, ILT4/CD85d, ILT5/CD85a, Integrin α 4/CD49d, CD5, IntegrinαE/CD103, CD6, Integrin α M/CD11b, CD8, Integrin α X/CD11c, Integrin β2/CD18, KIR/CD158, CD27/TNFRSF7, KIR2DL1, CD28, KIR2DL3, CD30/TNFRSF8, KIR2DL4/CD158d, CD31/PECAM-1, KIR2DS4, CD40 Ligand/TNFSF5, LAG-3, CD43, LAIR1, CD45, LAIR2, CD83, Leukotriene B4 R1, CD84/SLAMF5, NCAM-L1, CD94, NKG2A, CD97, NKG2C, CD229/SLAMF3, NKG2D, CD2F-10/SLAMF9, NT-4, CD69, NTB-A/SLAMF6, Common [symbol] Chain/IL-2 R [symbol] , Osteopontin, CRACC/SLAMF7, PD-1, CRTAM, PSGL-1, CTLA-4, RANK/TNFRSF11A, CX3CR1, CX3CL1, L-Selectin, CXCR3, SIRP (β1, CXCR4, SLAM, CXCR6, TCCR/WSX-1, DNAM-1, Thymopoietin, EMMPRIN/CD147, TIM-1, EphB6, TIM-2, Fas/TNFRSF6, TIM-3, Fas Ligand/TNFSF6, TIM-4, Fc [symbol] RIII/CD16, TIM-6, GITR/TNFRSF18, TNF R1/TNFRSF1A, Granulysin, TNF R11/TNFRSF1B, HVEM/TNFRSF 14, TRAIL R1/TNFRSF10A, IC AM-1/CD 54, TRAIL R2/TNFRSF10B, ICAM-2/CD102, TRAIL R3/TNFRSF10C, IFN- [symbol] R1, TRAIL R4/TNFRSF10D, IFN- [symbol] R2, TSLP, IL-1 RI and TSLP R.

[0242] In some embodiments, the heterologous fusion partner moiety is a T cell target protein. These proteins include, but are not limited to, 2B4/SLAMF4, IL-2 Rα, 4-1BB/TNFRSF9, IL-2Rβ, ALCAM, B7-1/CD80, IL-4R, B7-H3, BLAME/SLAMF8, BTLA, IL-6R, CCR3, IL-7 Rα, CCR4, CXCR1/IL-8 RA, CCR5, CCR6, IL-10 R α, CCR7, IL-10 Rβ, CCR8, IL-12 Rβ1, CCR9, IL-12 Rβ 2, CD2, IL-13Rα1, IL-13, CD3, CD4, ILT2/CD85j, ILT3/CD85k, ILT4/CD85d, ILT5/CD85a, Integrin α 4/CD49d, CD5, IntegrinαE/CD103, CD6, Integrin α M/CD11b, CD8, Integrin α X/CD11c, Integrin β2/CD18, KIR/CD158, CD27/TNFRSF7, KIR2DL1, CD28, KIR2DL3, CD30/TNFRSF8, KIR2DL4/CD158d, CD31/PECAM-1, KIR2DS4, CD40 Ligand/TNFSF5, LAG-3, CD43, LAIR1, CD45, LAIR2, CD83, Leukotriene B4 R1, CD84/SLAMF5, NCAM-L1, CD94, NKG2A, CD97, NKG2C, CD229/SLAMF3, NKG2D, CD2F-10/SLAMF9, NT-4, CD69, NTB-A/SLAMF6, Common [symbol] Chain/IL-2 R [symbol] , Osteopontin, CRACC/SLAMF7, PD-1, CRTAM, PSGL-1, CTLA-4, RANK/TNFRSF11A, CX3CR1, CX3CL1, L-Selectin, CXCR3, SIRP (β1, CXCR4, SLAM, CXCR6, TCCR/WSX-1, DNAM-1, Thymopoietin, EMMPRIN/CD147, TIM-1, EphB6, TIM-2, Fas/TNFRSF6, TIM-3, Fas Ligand/TNFSF6, TIM-4, Fc [symbol] RIII/CD16, TIM-6, GITR/TNFRSF18, TNF R1/TNFRSF1A, Granulysin, TNF R11/TNFRSF1B, HVEM/TNFRSF14, TRAIL R1/TNFRSF10A, ICAM-1/CD54, TRAIL R2/TNFRSF10B, ICAM-2/CD102, TRAIL R3/TNFRSF10C, IFN- [symbol] R1, TRAIL R4/TNFRSF10D, IFN- [symbol] R2, TSLP, IL-1 RI and TSLP R.

[0243] In some embodiments, the heterologous fusion partner moiety is a monocyte/macrophage cell target. These proteins include, but are not limited to, B7-1/CD80, ILT4/CD85d, B7-H1, ILT5/CD85a, Common β Chain, Integrin α 4/CD49d, BLAME/SLAMF8, Integrin α X/CD11c, CCL6/C10, Integrin (β 2/CD18, CD155/PVR, Integrin (β 3/CD61, CD31/PECAM-1, Latexin, CD36/SR-B3, Leukotriene B4 R1, CD40/TNFRSF5, LIMPII/SR-B2, CD43, LMIR1/CD300A, CD45, LMIR2/CD300c, CD68, LMIR3/CD300LF, CD84/SLAMF5, LMIR5/CD300LB, CD97, LMIR6/CD300LE, CD163, LRP-1, CD2F-10/SLAMF9, MARCO, CRACC/SLAMF7, MD-1, ECF-L, MD-2, EMMPRIN/CD147, MGL2, Endoglin/CD105, Osteoactivin/GPNMB, Fc [symbol] R1/CD64, Osteopontin, Fc [symbol] RIIB/CD32b, PD-L2, Fc [symbol] RIIC/CD32c, Siglec-3/CD33, Fc [symbol] RIIA/CD32a, SIGNR1/CD209, Fc [symbol] RIII/CD16, SLAM, GM-CSF R α, TCCR/WSX-1, ICAM-2/CD102, TLR3, IFN- [symbol] R1, TLR4, IFN- [symbol] R2, TREM-1, IL-1 RII, TREM-2, ILT2/CD85j, TREM-3, ILT3/CD85k, TREML1/TLT-1, 2B4/SLAMF4, IL-10 R α, ALCAM, IL-10 R β, Aminopeptidase N/ANPEP, ILT2/CD85j, Common β Chain, ILT3/CD85k, C1q R1/CD93, ILT4/CD85d, CCR1, ILT5/CD85a, CCR2, Integrin α 4/CD49d, CCR5, Integrin α M/CD11b, CCR8, Integrin α X/CD11c, CD155/PVR, Integrin (β 2/CD18, CD14, Integrin (β 3/CD61, CD36/SR-B3, LAIR1, CD43, LAIR2, CD45, Leukotriene B4 R1, CD68, LIMPIPSR-B2, CD84/SLAMF5, LMIR1/CD300A, CD97, LMIR2/CD300c, CD163, LMIR3/CD300LF, Coagulation Factor III/Tissue Factor, LMIR5/CD300LB, CX3CR1, CX3CL1, LMIR6/CD300LE, CXCR4, LRP-1, CXCR6, M-CSF R, DEP-1/CD148, MD-1, DNAM-1, MD-2, EMMPRIN/CD147, MMR, Endoglin/CD105, NCAM-L1, Fc [symbol] R1/CD64, PSGL-1, Fc [symbol] RIII/CD16, RP105, G-CSF R, L-Selectin, GM-CSF R α, Siglec-3/CD33, HVEM/TNFRSF14, SLAM, ICAM-1/CD54, TCCR/WSX-1, ICAM-2/CD102, TREM-1, IL-6 R, TREM-2, CXCR1/IL-8 RA, TREM-3 and TREML1/TLT-1.

[0244] In some embodiments, the heterologous fusion partner moiety is a Dendritic cell target, including, but not limited to, CD36/SR-B3, LOX-1/SR-E1, CD68, MARCO, CD163, SR-AI/MSR, CD5L, SREC-I, CL-P1/COLEC12, SREC-II, LIMPII/SR-B2, RP105, TLR4, TLR1, TLR5, TLR2, TLR6, TLR3, TLR9, 4-1BB Ligand/TNFSF9, IL-12/IL-23p40, 4-Amino-1,8-naphthalimide, ILT2/CD85j, CCL21/6Ckine, ILT3/CD85k, 8-oxo-dG, ILT4/CD85d, 8D6A, ILT5/CD85a, A2B5, Integrin α 4/CD49d, Aag, Integrin β 2/CD18, AMICA, Langerin, B7-2/CD86, Leukotriene B4 R1, B7-H3, LMIR1/CD300A, BLAME/SLAMF8, LMIR2/CD300c, C1q R1/CD93, LMIR3/CD300LF, CCR6, LMIR5/CD300LB, CCR7, LMIR6/CD300LE, CD40/TNFRSF5, MAG/Siglec-4a, CD43, MCAM, CD45, MD-1, CD68, MD-2, CD83, MDL-1/CLEC5A, CD84/SLAMF5, MMR, CD97, NCAM-L1, CD2F-10/SLAMF9, Osteoactivin/GPNMB, Chem 23, PD-L2, CLEC-1, RP105, CLEC-2, Siglec-2/CD22, CRACC/SLAMF7, Siglec-3/CD33, DC-SIGN, Siglec-5, DC-SIGNR/CD299, Siglec-6, DCAR, Siglec-7, DCIR/CLEC4A, Siglec-9, DEC-205, Siglec-10, Dectin-1/CLEC7A, Siglec-F, Dectin-2/CLEC6A, SIGNR1/CD209, DEP-1/CD148, SIGNR4, DLEC, SLAM, EMMPRIN/CD147, TCCR/WSX-1, Fc [symbol] R1/CD64, TLR3, Fc [symbol] RIIB/CD32b, TREM-1, Fc [symbol] RIIC/CD32c, TREM-2, Fc [symbol] RIIA/CD32a, TREM-3, Fc [symbol] RIII/CD16, TREML1/TLT-1, ICAM-2/CD102 and Vanilloid R1.

[0245] In some embodiments, the heterologous fusion partner moiety is a TNF receptor superfamily member, including, but not limited to, 4-1BB/TNFRSF9, NGF R/TNFRSF16, BAFF R/TNFRSF13C, Osteoprotegerin/TNFRSF11B, BCMA/TNFRSF17, OX40/TNFRSF4, CD27/TNFRSF7, RANK/TNFRSF11A, CD30/TNFRSF8, RELT/TNFRSF19L, CD40/TNFRSF5, TACI/TNFRSF13B, DcR3/TNFRSF6B, TNF R1/TNFRSF1A, DcTRAIL R1/TNFRSF23, TNF RII/TNFRSF1B, DcTRAIL R2/TNFRSF22, TRAIL R1/TNFRSF10A, DR3/TNFRSF25, TRAIL R2/TNFRSF10B, DR6/TNFRSF21, TRAIL R3/TNFRSF10C, EDAR, TRAIL R4/TNFRSF10D, Fas/TNFRSF6, TROY/TNFRSF19, GITR/TNFRSF18, TWEAK R/TNFRSF12, HVEM/TNFRSF14, XEDAR, Lymphotoxin β R/TNFRSF3, 4-1BB Ligand/TNF SF9, Lymphotoxin, APRIL/TNFSF13, Lymphotoxin β/TNFSF3, BAFF/TNFSF13C, OX40 Ligand/TNFSF4, CD27 Ligand/TNFSF7, TL1A/TNFSF15, CD30 Ligand/TNFSF8, TNF-α/TNFSF1A, CD40 Ligand/TNFSF5, TNF-β/TNFSF1B, EDA-A2, TRAIL/TNF SF10, F as Ligand/TNFSF6, TRANCE/TNF SF11, GITR Ligand/TNFSF18, TWEAK/TNF SF12 and LIGHT/TNFSF14.

[0246] In some embodiments, the heterologous fusion partner moiety is a Hedgehog family member selected from the group consisting of Patched and Smoothened.

[0247] In some embodiments, the heterologous fusion partner moiety is a receptor tyrosine kinase including, but not limited to, Ax1, FGF R4, C1q R1/CD93, FGF R5, DDR1, Flt-3, DDR2, HGF R, Dtk, IGF-I R, EGF R, IGF-II R, Eph, INSRR, EphA1, Insulin R/CD220, EphA2, M-CSF R, EphA3, Mer, EphA4, MSP R/Ron, EphA5, MuSK, EphA6, PDGF R α, EphA7, PDGF R β, EphA8, Ret, EphB1, ROR1, EphB2, ROR2, EphB3, SCF R/c-kit, EphB4, Tie-1, EphB6, Tie-2, ErbB2, TrkA, ErbB3, TrkB, ErbB4, TrkC, FGF R1, VEGF R1/Flt-1, FGF R2, VEGF R2/Flk-1, FGF R3 and VEGF R3/Flt-4.

[0248] In some embodiments, the heterologous fusion partner moiety is a Transforming Growth Factor (TGF)-β superfamily member selected from the group consisting of Activin RIA/ALK-2, GFR α-1, Activin RIB/ALK-4, GFR α2, Activin RHA, GFR α-3, Activin RIIB, GFR α-4, ALK-1, MIS RII, ALK-7, Ret, BMPR-IA/ALK-3, TGF-betβa R1/ALK-5, BMPR-IB/ALK-6, TGF-β RII, BMPR-II, TGF-β RIIb, Endoglin/CD 105 and TGF-β RIII

[0249] In some embodiments, the heterologous fusion partner moiety is a Wnt-related molecule selected from the group consisting of Frizzled-1, Frizzled-8, Frizzled-2, Frizzled-9, Frizzled-3, sFRP-1, Frizzled-4, sFRP-2, Frizzled-5, sFRP-3, Frizzled-6, sFRP-4, Frizzled-7, MFRP, LRP 5, LRP 6, Wnt-1, Wnt-8a, Wnt-3a, Wnt-10b, Wnt-4, Wnt-11, Wnt-5a, Wnt-9a and Wnt-7a.

[0250] In some embodiments, the heterologous fusion partner moiety is a receptor ligand selected from the group consisting of 4-1BB Ligand/TNFSF9, Lymphotoxin, APRIL/TNFSF13, Lymphotoxin β/TNFSF3, BAFF/TNFSF13C, OX40 Ligand/TNF SF4, CD27 Ligand/TNFSF7, TL1A/TNFSF15, CD30 Ligand/TNFSF8, TNF-α/TNFSF1A, CD40 Ligand/TNFSF5, TNF-β/TNFSF1B, EDA-A2, TRAIL/TNFSF10, Fas Ligand/TNFSF6, TRANCE/TNF SF11, GITR Ligand/TNFSF18, TWEAK/TNFSF12, LIGHT/TNFSF14, Amphiregulin, NRG1 isoform GGF2, Betacellulin, NRG1 Isoform SMDF, EGF, NRG1-α/HRG1-α, Epigen, NRG1-β1/HRG1-β1, Epiregulin, TGF-α, HB-EGF, TMEFF1/Tomoregulin-1, Neuregulin-3, TMEFF2, IGF-I, IGF-II, Insulin, Activin A, Activin B, Activin AB, Activin C, BMP-2, BMP-7, BMP-3, BMP-8, BMP-3b/GDF-10, BMP-9, BMP-4, BMP-15, BMP-5, Decapentaplegic, BMP-6, GDF-1, GDF-8, GDF-3, GDF-9, GDF-5, GDF-11, GDF-6, GDF-15, GDF-7, Artemin, Neurturin, GDNF, Persephin, TGF-β, TGF-β 2, TGF-β 1, TGF-β 3, LAP (TGF-β1), TGF-β 5, Latent TGF-β 1, Latent TGF-β by 1, TGF-β 1.2, Lefty, Nodal, MIS/AMH, FGF acidic, FGF-12, FGF basic, FGF-13, FGF-3, FGF-16, FGF-4, FGF-17, FGF-5, FGF-19, FGF-6, FGF-20, FGF-8, FGF-21, FGF-9, FGF-23, FGF-10, KGF/FGF-7, FGF-11, Neuropilin-1, P1GF, Neuropilin-2, P1GF-2, PDGF, PDGF-A, VEGF, PDGF-B, VEGF-B, PDGF-C, VEGF-C, PDGF-D, VEGF-D and PDGF-AB.

[0251] In some embodiments, the heterologous fusion partner moiety is a tumor antigen selected from the group consisting of Squamous Cell Carcinoma Antigen 1 (SCCA-1), (PROTEIN T4-A), Squamous Cell Carcinoma Antigen 2 (SCCA-2), Ovarian carcinoma antigen CA125 (1A1-3B; KIAA0049), MUCIN 1 (TUMOR-ASSOCIATED MUCIN; Carcinoma-Associated Mucin; Polymorphic Epithelial Mucin; PEM; PEMT; EPISIALIN; Tumor-Associated Epithelial Membrane Antigen; EMA; H23AG; Peanut-Reactive Urinary Mucin; PUM; and Breast Carcinoma-Associated Antigen DF3), CTCL tumor antigen sel-1, CTCL tumor antigen se14-3, CTCL tumor antigen se20-4, CTCL tumor antigen se20-9, CTCL tumor antigen se33-1, CTCL tumor antigen se37-2, CTCL tumor antigen se57-1, CTCL tumor antigen se89-1, Prostate-specific membrane antigen, 5T4 oncofetal trophoblast glycoprotein, Orf73 Kaposi's sarcoma-associated herpesvirus, MAGE-C1 (cancer/testis antigen CT7), MAGE-B1 ANTIGEN (MAGE-XP Antigen; DAM10), MAGE-B2 Antigen (DAME), MAGE-2 ANTIGEN, MAGE-4a antigen, MAGE-4b antigen, Colon cancer antigen NY-CO-45, Lung cancer antigen NY-LU-12 variant A, Cancer associated surface antigen, Adenocarcinoma antigen ART1, Paraneoplastic associated brain-testis-cancer antigen (onconeuronal antigen MA2; paraneoplastic neuronal antigen), Neuro-oncological ventral antigen 2 (NOVA2), Hepatocellular carcinoma antigen gene 520, Tumor-Associated Antigen CO-029, Tumor-associated antigen MAGE-X2, Synovial sarcoma, X breakpoint 2, Squamous cell carcinoma antigen recognized by T cell, Serologically defined colon cancer antigen 1, Serologically defined breast cancer antigen NY-BR-15, Serologically defined breast cancer antigen NY-BR-16, Chromogranin A, parathyroid secretory protein 1, DUPAN-2, CA 19-9, CA 72-4, CA 195 and L6.

[0252] In some embodiments, the heterologous fusion partner moiety is a B cell target selected from the group consisting of CD10, CD19, CD20, CD21, CD22, CD23, CD24, CD37, CD38, CD39, CD40, CD72, CD73, CD74, CDw75, CDw76, CD77, CD78, CD79a/b, CD80, CD81, CD82, CD83, CD84, CD85, CD86, CD89, CD98, CD126, CD127, CDw130, CD138 and CDw150.

[0253] In some embodiments, the heterologous fusion partner moiety is n angiogenesis target selected from the group consisting of Angiopoietin-1, Angiopoietin-like 2, Angiopoietin-2, Angiopoietin-like 3, Angiopoietin-3, Angiopoietin-like 7/CDT6, Angiopoietin-4, Tie-1, Angiopoietin-like 1, Tie-2, Angiogenin, iNOS, Coagulation Factor III/Tissue Factor, nNOS, CTGF/CCN2, NOV/CCN3, DANCE, OSM, EDG-1, Plfr, EG-VEGF/PK1, Proliferin, Endostatin, ROB04, Erythropoietin, Thrombospondin-1, Kininostatin, Thrombospondin-2, MFG-E8, Thrombospondin-4, Nitric Oxide, VG5Q, eNOS, EphA1, EphA5, EphA2, EphA6, EphA3, EphA7, EphA4, EphA8, EphB1, EphB4, EphB2, EphB6, EphB3, Ephrin-A1, Ephrin-A4, Ephrin-A2, Ephrin-A5, Ephrin-A3, Ephrin-B1, Ephrin-B3, Ephrin-B2, FGF acidic, FGF-12, FGF basic, FGF-13, FGF-3, FGF-16, FGF-4, FGF-17, FGF-5, FGF-19, FGF-6, FGF-20, FGF-8, FGF-21, FGF-9, FGF-23, FGF-10, KGF/FGF-7, FGF-11, FGF R1, FGF R4, FGF R2, FGF R5, FGF R3, Neuropilin-1, Neuropilin-2, Semaphorin 3A, Semaphorin 6B, Semaphorin 3C, Semaphorin 6C, Semaphorin 3E, Semaphorin 6D, Semaphorin 6A, Semaphorin 7A, MMP, MMP-11, MMP-1, MMP-12, MMP-2, MMP-13, MMP-3, MMP-14, MMP-7, MMP-15, MMP-8, MMP-16/MT3-MMP, MMP-9, MMP-24/MT5-MMP, MMP-10, MMP-25/MT6-MMP, TIMP-1, TIMP-3, TIMP-2, TIMP-4, ACE, IL-13 R α 1, IL-13, C1q R1/CD93, Integrin α 4/CD49d, VE-Cadherin, Integrin β 2/CD18, CD31/PECAM-1, KLF4, CD36/SR-B3, LYVE-1, CD151, MCAM, CL-P1/COLEC12, Nectin-2/CD112, Coagulation Factor III/Tissue Factor, E-Selectin, D6, P-Selectin, DC-SIGNR/CD299, SLAM, EMMPRIN/CD147, Tie-2, Endoglin/CD105, TNF RI/TNFRSF1A, EPCR, TNF RII/TNFRSF1B, Erythropoietin R, TRAIL R1/TNFRSF10A, ESAM, TRAIL R2/TNFRSF10B, FABP5, VCAM-1, ICAM-1/CD54, VEGF R2/Flk-1, ICAM-2/CD102, VEGF R3/Flt-4, IL-1 RI and VG5Q.

[0254] B. Linkers

[0255] In many embodiments of fusion proteins comprising a PVRIG polypeptide and a fusion partner moiety, optional flexible linkers are used to join the sequences in frame. A “flexible linker” herein refers to a peptide or polypeptide containing two or more amino acid residues joined by peptide bond(s) that provides increased rotational freedom for two polypeptides linked thereby than the two linked polypeptides would have in the absence of the flexible linker. Such rotational freedom allows each component of the fusion protein to interact with its intended target without hindrance. Generally these linkers are mixtures of glycine and serine, such as -(GGGS)n-, where n is from 1, 2, 3, 4, or 5 (SEQ ID NO:1).

[0256] Exemplary flexible peptides/polypeptides include, but are not limited to, the amino acid sequences shown in FIG. 105. Additional flexible peptide/polypeptide sequences are well known in the art. Other suitable peptide linker domains optionally include the TEV linker ENLYFQG (SEQ ID NO:2), a linear epitope recognized by the Tobacco Etch Virus protease. Exemplary peptides/polypeptides include, but are not limited to, GSENLYFQGSG (SEQ ID NO:84). Other suitable peptide linker domains include helix forming linkers such as Ala-(Glu-Ala-Ala-Ala-Lys)n-Ala (n=1-5) (SEQ ID NO:4). Additional helix forming peptide/polypeptide sequences are well known in the art.

[0257] C. Particular Constructs

[0258] In one embodiment, the linker domain contains the hinge region of an immunoglobulin. In a further embodiment, the hinge region is derived from a human immunoglobulin. Suitable human immunoglobulins that the hinge can be derived from include IgG, IgD and IgA. In a further embodiment, the hinge region is derived from human IgG. Amino acid sequences of immunoglobulin hinge regions and other domains are well known in the art. In one embodiment, PVRIG fusion polypeptides contain the hinge, CH2 and CH3 regions of a human immunoglobulin Cγ1 chain, optionally with the Cys at position 220 (according to full length human IgG1, position 5 in SEQ ID NO:1354) replaced with a Ser)

[0259] BF) having at least 85%, 90%, 95%, 99% or 100% sequence homology to amino acid sequence set forth in SEQ ID NO:5:

EPKSCDKTHTCPPCPAPELLGGPSVFLFPPKPKDTLMISRTPEVTCVVV
DVSHEDPEVKFNWYVDGVEVHNAKTKPREEQYNSTYRVVSVLTVLHQDW
LNGKEYKCKVSNKALPAPIEKTISKAKGQPREPQVYTLPPSRDELTKNQ
VSLTCLVKGFYPSDIAVEWESNGQPENNYKTTPPVLDSDGSFFLYSKLT
VDKSRWQQGNVFSCSVMHEALHNHYTQKSLSLSPGK.

[0260] The hinge can be further shortened to remove amino acids 1, 2, 3, 4, 5, or combinations thereof of any one of BE to BG and. In one embodiment, amino acids 1-5 of any one of BE to BG are deleted. Exemplary PVRIG fusion polypeptides comprised of the hinge, CH2 and CH3 regions of a human immunoglobulin Cγ1 chain with the Cys at position 220 replaced with a Ser are set forth in AZ.

[0261] In another embodiment, the PVRIG fusion polypeptides contain the CH2 and CH3 regions of human immunoglobulin Cγ1 chain having N297A mutation (BG) or the human Fc carrying the C220S, C226 and C229S mutations (BL).

[0262] In another embodiment, PVRIG fusion polypeptides contain the CH2 and CH3 regions of a human immunoglobulin Cγ1 chain having at least 85%, 90%, 95%, 99% or 100% sequence homology to amino acid sequence set forth in BH:

(SEQ ID NO: 6)
APELLGGPSVFLFPPKPKDTLMISRTPEVTCVVVDVSHEDPEVKFNWYV
DGVEVHNAKTKPREEQYNSTYRVVSVLTVLHQDWLNGKEYKCKVSNKAL
PAPIEKTISKAKGQPREPQVYTLPPSRDELTKNQVSLTCLVKGFYPSDI
AVEWESNGQPENNYKTTPPVLDSDGSFFLYSKLTVDKSRWQQGNVFSCS
VMHEALHNHYTQKSLSLSPGK

[0263] In another embodiment, the PVRIG fusion polypeptides contain the hinge, CH2 and CH3 regions of a murine immunoglobulin Cγ2a chain at least 85%, 90%, 95%, 99% or 100% sequence homology to amino acid sequence set forth in BI:

(SEQ ID NO: 7)
EPRGPTIKPCPPCKCPAPNLLGGPSVFIFPPKIKDVLMISLSPIVTCVV
VDVSEDDPDVQISWFVNNVEVHTAQTQTHREDYNSTLRVVSALPIQHQD
WMSGKEFKCKVNNKDLPAPIERTISKPKGSVRAPQVYVLPPPEEEMTKK
QVTLTCMVTDFMPEDIYVEWTNNGKTELNYKNTEPVLDSDGSYFMYSKL
RVEKKNWVERNSYSCSVVHEGLHNHHTTKSFSRTPGK.

[0264] In another embodiment, the PVRIG fusion polypeptides contain the CH2 and CH3 regions of a murine immunoglobulin Cγ2a chain having N297A mutation (BJ) or the murine Fc without the Hinge (BK).

[0265] In another embodiment, the linker domain optionally contains a hinge region of an immunoglobulin as described above, and further includes one or more additional immunoglobulin domains.

### VI. Nucleic Acid Compositions

[0266] Nucleic acid compositions encoding the PVRIG polypeptides of the invention are also provided, as well as expression vectors containing the nucleic acids and host cells transformed with the nucleic acid and/or expression vector compositions.

[0267] The nucleic acid compositions that encode the PVRIG polypeptides are generally put into a single expression vector as is known in the art, transformed into host cells, where they are expressed to form the PVRIG proteins (or fusion proteins) of the invention. The nucleic acids can be put into expression vectors that contain the appropriate transcriptional and translational control sequences, including, but not limited to, signal and secretion sequences, regulatory sequences, promoters, origins of replication, selection genes, etc.

[0268] For example, to express the protein DNA, DNAs can be obtained by standard molecular biology techniques (e.g., PCR amplification or gene synthesis) and the DNAs can be inserted into expression vectors such that the genes are operatively linked to transcriptional and translational control sequences. In this context, the term “operatively linked” is intended to mean that an antibody gene is ligated into a vector such that transcriptional and translational control sequences within the vector serve their intended function of regulating the transcription and translation of the antibody gene. The expression vector and expression control sequences are chosen to be compatible with the expression host cell used. The protein genes are inserted into the expression vector by standard methods (e.g., ligation of complementary restriction sites on the gene fragment and vector, or blunt end ligation if no restriction sites are present). Additionally or alternatively, the recombinant expression vector can encode a signal peptide that facilitates secretion of the protein (including fusion proteins) from a host cell. The gene can be cloned into the vector such that the signal peptide is linked in-frame to the amino terminus of the gene. The signal peptide can be an immunoglobulin signal peptide or a heterologous signal peptide (i.e., a signal peptide from a non-immunoglobulin protein).

[0269] In addition to the protein genes, the recombinant expression vectors according to at least some embodiments of the invention carry regulatory sequences that control the expression of the genes in a host cell. The term “regulatory sequence” is intended to include promoters, enhancers and other expression control elements (e.g., polyadenylation signals) that control the transcription or translation of the genes. Such regulatory sequences are described, for example, in Goeddel (“Gene Expression Technology”, Methods in Enzymology 185, Academic Press, San Diego, Calif. (1990)). It will be appreciated by those skilled in the art that the design of the expression vector, including the selection of regulatory sequences, may depend on such factors as the choice of the host cell to be transformed, the level of expression of protein desired, etc. Preferred regulatory sequences for mammalian host cell expression include viral elements that direct high levels of protein expression in mammalian cells, such as promoters and/or enhancers derived from cytomegalovirus (CMV), Simian Virus 40 (SV40), adenovirus, (e.g., the adenovirus major late promoter (AdMLP) and polyoma. Alternatively, nonviral regulatory sequences may be used, such as the ubiquitin promoter or β-globin promoter. Still further, regulatory elements composed of sequences from different sources, such as the SR α. promoter system, which contains sequences from the SV40 early promoter and the long terminal repeat of human T cell leukemia virus type 1 (Takebe, Y. et al. (1988) Mol. Cell. Biol. 8:466-472).

[0270] In addition to the protein genes and regulatory sequences, the recombinant expression vectors according to at least some embodiments of the invention may carry additional sequences, such as sequences that regulate replication of the vector in host cells (e.g., origins of replication) and selectable marker genes. The selectable marker gene facilitates selection of host cells into which the vector has been introduced (see, e.g., U.S. Pat. Nos. 4,399,216, 4,634,665 and 5,179,017, all by Axel et al.). For example, typically the selectable marker gene confers resistance to drugs, such as G418, hygromycin or methotrexate, on a host cell into which the vector has been introduced. Preferred selectable marker genes include the dihydrofolate reductase (DHFR) gene (for use in dhfr-host cells with methotrexate selection/amplification) and the neo gene (for G418 selection).

[0271] For expression of the proteins of the invention, an expression vector encoding the protein is transfected into a host cell by standard techniques. The various forms of the term “transfection” are intended to encompass a wide variety of techniques commonly used for the introduction of exogenous DNA into a prokaryotic or eukaryotic host cell, e.g., electroporation, calcium-phosphate precipitation, DEAE-dextran transfection and the like. Although it is theoretically possible to express the proteins according to at least some embodiments of the invention in either prokaryotic or eukaryotic host cells, expression of antibodies in eukaryotic cells, and most preferably mammalian host cells, is the most preferred.

[0272] Preferred mammalian host cells for expressing the recombinant proteins according to at least some embodiments of the invention include Chinese Hamster Ovary (CHO cells) (including dhfr-CHO cells, described in Urlaub and Chasin, (1980) Proc. Natl. Acad. Sci. USA 77:4216-4220, used with a DHFR selectable marker, e.g., as described in R. J. Kaufman and P. A. Sharp (1982) Mol. Biol. 159:601-621), NSO myeloma cells, COS cells and SP2 cells. In particular, for use with NSO myeloma cells, another preferred expression system is the GS gene expression system disclosed in WO 87/04462, WO 89/01036 and EP 338,841. When recombinant expression vectors encoding protein genes are introduced into mammalian host cells, the proteins are produced by culturing the host cells for a period of time sufficient to allow for expression of the protein in the host cells or, more preferably, secretion of the protein into the culture medium in which the host cells are grown. Antibodies can be recovered from the culture medium using standard protein purification methods.

[0273] PVRIG protein coding sequences of interest include those encoded by native sequences, as well as nucleic acids that, by virtue of the degeneracy of the genetic code, are not identical in sequence to the disclosed nucleic acids, and variants thereof. Variant polypeptides can include amino acid substitutions as discussed herein. Techniques for in vitro mutagenesis of cloned genes are known. Also included in the subject invention are polypeptides that have been modified using ordinary molecular biological techniques so as to improve their resistance to proteolytic degradation or to optimize solubility properties or to render them more suitable as a therapeutic agent.

[0274] The invention further provides nucleic acids which encode a PVRIG protein according to the invention, or a fragment or conjugate thereof. The nucleic acids may be present in whole cells, in a cell lysate, or in a partially purified or substantially pure form. A nucleic acid is “isolated” or “rendered substantially pure” when purified away from other cellular components or other contaminants, e.g., other cellular nucleic acids or proteins, by standard techniques, including alkaline/SDS treatment, CsCl banding, column chromatography, agarose gel electrophoresis and others well known in the art. See, F. Ausubel, et al., ed. (1987) Current Protocols in Molecular Biology, Greene Publishing and Wiley Interscience, New York. A nucleic acid according to at least some embodiments of the invention can be, for example, DNA or RNA and may or may not contain intronic sequences.

### VII. Formulations

[0275] The therapeutic compositions used in the practice of the foregoing methods can be formulated into pharmaceutical compositions comprising a carrier suitable for the desired delivery method. Suitable carriers include any material that when combined with the therapeutic composition retains the anti-tumor function of the therapeutic composition and is generally non-reactive with the patient's immune system. Examples include, but are not limited to, any of a number of standard pharmaceutical carriers such as sterile phosphate buffered saline solutions, bacteriostatic water, and the like (see, generally, Remington's Pharmaceutical Sciences 16^{th} Edition, A. Osal Ed 1980). Acceptable carriers, excipients, or stabilizers are nontoxic to recipients at the dosages and concentrations employed, and include buffers such as phosphate, citrate, acetate, and other organic acids; antioxidants including ascorbic acid and methionine; preservatives (such as octadecyldimethylbenzyl ammonium chloride; hexamethonium chloride; benzalkonium chloride, benzethonium chloride; phenol, butyl orbenzyl alcohol; alkyl parabens such as methyl or propyl paraben; catechol; resorcinol; cyclohexanol; 3-pentanol; and m-cresol); low molecular weight (less than about 10 residues) polypeptides; proteins, such as serum albumin, gelatin, or immunoglobulins; hydrophilic polymers such as polyvinylpyrrolidone; amino acids such as glycine, glutamine, asparagine, histidine, arginine, or lysine; monosaccharides, disaccharides, and other carbohydrates including glucose, mannose, or dextrins; chelating agents such as EDTA; sugars such as sucrose, mannitol, trehalose or sorbitol; sweeteners and other flavoring agents; fillers such as microcrystalline cellulose, lactose, corn and other starches; binding agents; additives; coloring agents; salt-forming counter-ions such as sodium; metal complexes (e.g. Zn-protein complexes); and/or non-ionic surfactants such as TWEEN™, PLURONICS™ or polyethylene glycol (PEG).

[0276] In a preferred embodiment, the pharmaceutical composition that comprises the antibodies of the invention may be in a water-soluble form, such as being present as pharmaceutically acceptable salts, which is meant to include both acid and base addition salts. “Pharmaceutically acceptable acid addition salt” refers to those salts that retain the biological effectiveness of the free bases and that are not biologically or otherwise undesirable, formed with inorganic acids such as hydrochloric acid, hydrobromic acid, sulfuric acid, nitric acid, phosphoric acid and the like, and organic acids such as acetic acid, propionic acid, glycolic acid, pyruvic acid, oxalic acid, maleic acid, malonic acid, succinic acid, fumaric acid, tartaric acid, citric acid, benzoic acid, cinnamic acid, mandelic acid, methanesulfonic acid, ethanesulfonic acid, p-toluenesulfonic acid, salicylic acid and the like. “Pharmaceutically acceptable base addition salts” include those derived from inorganic bases such as sodium, potassium, lithium, ammonium, calcium, magnesium, iron, zinc, copper, manganese, aluminum salts and the like. Particularly preferred are the ammonium, potassium, sodium, calcium, and magnesium salts. Salts derived from pharmaceutically acceptable organic non-toxic bases include salts of primary, secondary, and tertiary amines, substituted amines including naturally occurring substituted amines, cyclic amines and basic ion exchange resins, such as isopropylamine, trimethylamine, diethylamine, triethylamine, tripropylamine, and ethanolamine. The formulations to be used for in vivo administration are preferrably sterile. This is readily accomplished by filtration through sterile filtration membranes or other methods.

[0277] Administration of the pharmaceutical composition comprising antibodies of the present invention, preferably in the form of a sterile aqueous solution, may be done in a variety of ways, including, but not limited to subcutaneously and intravenously. Subcutaneous administration may be preferable in some circumstances because the patient may self-administer the pharmaceutical composition. Many protein therapeutics are not sufficiently potent to allow for formulation of a therapeutically effective dose in the maximum acceptable volume for subcutaneous administration. This problem may be addressed in part by the use of protein formulations comprising arginine-HCl, histidine, and polysorbate (see WO 04091658). Fc polypeptides of the present invention may be more amenable to subcutaneous administration due to, for example, increased potency, improved serum half-life, or enhanced solubility.

[0278] As is known in the art, protein therapeutics are often delivered by IV infusion or bolus. The antibodies of the present invention may also be delivered using such methods. For example, administration may venious be by intravenous infusion with 0.9% sodium chloride as an infusion vehicle.

[0279] In addition, any of a number of delivery systems are known in the art and may be used to administer the Fc variants of the present invention. Examples include, but are not limited to, encapsulation in liposomes, microparticles, microspheres (eg. PLA/PGA microspheres), and the like. Alternatively, an implant of a porous, non-porous, or gelatinous material, including membranes or fibers, may be used. Sustained release systems may comprise a polymeric material or matrix such as polyesters, hydrogels, poly(vinylalcohol), polylactides, copolymers of L-glutamic acid and ethyl-L-gutamate, ethylene-vinyl acetate, lactic acid-glycolic acid copolymers such as the LUPRON DEPOT®, and poly-D-(−)-3-hydroxyburyric acid. The antibodies disclosed herein may also be formulated as immunoliposomes. A liposome is a small vesicle comprising various types of lipids, phospholipids and/or surfactant that is useful for delivery of a therapeutic agent to a mammal. Liposomes containing the antibody are prepared by methods known in the art, such as described in Epstein et al., 1985, Proc Natl Acad Sci USA, 82:3688; Hwang et al., 1980, Proc Natl Acad Sci USA, 77:4030; U.S. Pat. Nos. 4,485,045; 4,544,545; and PCT WO 97/38731. Liposomes with enhanced circulation time are disclosed in U.S. Pat. No. 5,013,556. The components of the liposome are commonly arranged in a bilayer formation, similar to the lipid arrangement of biological membranes. Particularly useful liposomes can be generated by the reverse phase evaporation method with a lipid composition comprising phosphatidylcholine, cholesterol and PEG-derivatized phosphatidylethanolamine (PEG-PE). Liposomes are extruded through filters of defined pore size to yield liposomes with the desired diameter. A chemotherapeutic agent or other therapeutically active agent is optionally contained within the liposome (Gabizon et al., 1989, J National Cancer Inst 81:1484).

[0280] The antibodies may also be entrapped in microcapsules prepared by methods including but not limited to coacervation techniques, interfacial polymerization (for example using hydroxymethylcellulose or gelatin-microcapsules, or poly-(methylmethacylate) microcapsules), colloidal drug delivery systems (for example, liposomes, albumin microspheres, microemulsions, nano-particles and nanocapsules), and macroemulsions. Such techniques are disclosed in Remington's Pharmaceutical Sciences 16th edition, Osol, A. Ed., 1980. Sustained-release preparations may be prepared. Suitable examples of sustained-release preparations include semipermeable matrices of solid hydrophobic polymer, which matrices are in the form of shaped articles, e.g. films, or microcapsules. Examples of sustained-release matrices include polyesters, hydrogels (for example poly(2-hydroxyethyl-methacrylate), or poly(vinylalcohol)), polylactides (U.S. Pat. No. 3,773,919), copolymers of L-glutamic acid and gamma ethyl-L-glutamate, non-degradable ethylene-vinyl acetate, degradable lactic acid-glycolic acid copolymers such as the LUPRON DEPOT® (which are injectable microspheres composed of lactic acid-glycolic acid copolymer and leuprolide acetate), poly-D-(−)-3-hydroxybutyric acid, and ProLease® (commercially available from Alkermes), which is a microsphere-based delivery system composed of the desired bioactive molecule incorporated into a matrix of poly-DL-lactide-co-glycolide (PLG).

[0281] The dosing amounts and frequencies of administration are, in a preferred embodiment, selected to be therapeutically or prophylactically effective. As is known in the art, adjustments for protein degradation, systemic versus localized delivery, and rate of new protease synthesis, as well as the age, body weight, general health, sex, diet, time of administration, drug interaction and the severity of the condition may be necessary, and will be ascertainable with routine experimentation by those skilled in the art.

[0282] The concentration of the antibody in the formulation may vary from about 0.1 to 100 weight %. In a preferred embodiment, the concentration of the Fc variant is in the range of 0.003 to 1.0 molar. In order to treat a patient, a therapeutically effective dose of the Fc variant of the present invention may be administered. By “therapeutically effective dose” herein is meant a dose that produces the effects for which it is administered. The exact dose will depend on the purpose of the treatment, and will be ascertainable by one skilled in the art using known techniques. Dosages may range from 0.0001 to 100 mg/kg of body weight or greater, for example 0.1, 1, 10, or 50 mg/kg of body weight, with 1 to 10 mg/kg being preferred.

### VIII. Methods of Using Compositions of the Invention in Treatment

[0283] As discussed herein, PVRIG is involved in the immuno-oncology pathway, which means that manipulating certain signaling pathways can have two different effects. On one hand, the PVRIG protein suppresses T cell activation and one or more of a number of other pathways, through binding to its ligands, including PVLR2. Thus, by inhibiting the interaction of PVRIG and PVLR2, for example using antibodies to PVRIG, the suppression is alleviated, thereby increasing an immune response to allow treatment of conditions for which a stronger immune response is desired, such as cancer and pathogen infection. This is referred to as a “immuno-stimulatory” response. On the other hand, by increasing the amount of PVRIG in a patient, such as by adding PVRIG ECD polypeptides, the suppression is increased, thereby decreasing the immune response to allow treatment of conditions for which a decreased immune response is desired, such as autoimmune diseases and inflammation.

[0284] Accordingly, once made, the PVRIG proteins of the invention find use in a variety of applications, including using them in screening assays for additional immunomodulatory agents, as well as treatment of patients as is more fully outlined below.

[0285] With regard to the immuno-stimulatory treatments using anti-PVRIG antibodies, reference is made to U.S. Ser. No. 15/048,967, filed Feb. 19, 2016, entitled “Anti-PVRIG Antibodies and Methods of Use, claiming priority to U.S. Ser. No. 62/118,208, filed Feb. 19, 2015, and to U.S. Ser. No. 62/141,120, filed Mar. 31, 2015, and to U.S. Ser. No. 62/235,823, filed Oct. 1, 2015, all of which is expressly incorporated by reference in its entirety herein.

[0286] A. Treatment

[0287] The present invention provides methods of treating a number of diseases and/or conditions associated with an immune condition. An “immune condition” includes patients who would benefit from immunostimulatory action, such as cancer or pathogen infection, as well as patients who would benefit from immunoinhibitory action, such as autoimmune diseases and inflammation.

[0288] In some embodiments, the PVRIG polypeptides of the invention are used to treat autoimmune diseases. Suitable autoimmune diseases include, but are not limited to, multiple sclerosis, including relapsing-remitting multiple sclerosis, primary progressive multiple sclerosis, and secondary progressive multiple sclerosis, progressive relapsing multiple sclerosis, chronic progressive multiple sclerosis, transitional/progressive multiple sclerosis, rapidly worsening multiple sclerosis, clinically-definite multiple sclerosis, malignant multiple sclerosis, also known as Marburg's Variant, acute multiple sclerosis, conditions relating to multiple sclerosis, psoriasis, rheumatoid arthritis, psoriatic arthritis, gout and pseudo-gout, juvenile idiopathic arthritis, Still's disease, rheumatoid vasculitis, conditions relating to rheumatoid arthritis, discoid lupus erythematosus, lupus arthritis, lupus pneumonitis, lupus nephritis, conditions relating to systemic lupus erythematosus include osteoarticular tuberculosis, antiphospholipid antibody syndrome, systemic lupus erythematosus (SLE); discoid lupus erythematosus, inflammatory bowel disease, ulcerative colitis, Crohn's disease, benign lymphocytic angiitis, thrombocytopenic purpura, idiopathic thrombocytopenia, idiopathic autoimmune hemolytic anemia, pure red cell aplasia, Sjögren's syndrome, rheumatic disease, connective tissue disease, inflammatory rheumatism, degenerative rheumatism, extra-articular rheumatism, juvenile rheumatoid arthritis, arthritis uratica, muscular rheumatism, chronic polyarthritis, cryoglobulinemic vasculitis, ANCA-associated vasculitis, antiphospholipid syndrome, myasthenia gravis, autoimmune hemolytic anaemia, Guillain-Barré syndrome, chronic immune polyneuropathy, autoimmune thyroiditis, insulin dependent diabetes mellitus, type I diabetes, Addison's disease, membranous glomerulonephropathy, Goodpasture's disease, autoimmune gastritis, autoimmune atrophic gastritis, pernicious anaemia, pemphigus, pemphigus vulgaris, cirrhosis, primary biliary cirrhosis, dermatomyositis, polymyositis, fibromyositis, myogelosis, celiac disease, immunoglobulin A nephropathy, Henoch-Schönlein purpura, Evans syndrome, Dermatitis, atopic dermatitis, psoriasis, psoriasis arthropathica, Graves' disease, Graves' ophthalmopathy, scleroderma, systemic scleroderma, progressive systemic scleroderma, asthma, allergy, primary biliary cirrhosis, Hashimoto's thyroiditis, primary myxedema, sympathetic ophthalmia, autoimmune uveitis, anterior uveitis (or iridocyclitis), intermediate uveitis (pars planitis), posterior uveitis (or chorioretinitis), panuveitic form, hepatitis, chronic action hepatitis, collagen diseases, ankylosing spondylitis, periarthritis humeroscapularis, panarteritis nodosa, chondrocalcinosis, Wegener's granulomatosis, microscopic polyangiitis, chronic urticaria, bullous skin disorders, pemphigoid, bullous pemphigoid, cicatricial pemphigoid, vitiligo, atopic eczema, eczema, chronic urticaria, autoimmune urticaria, normocomplementemic urticarial vasculitis, hypocomplementemic urticarial vasculitis, autoimmune lymphoproliferative syndrome, Devic's disease, sarcoidosis, pernicious anemia, childhood autoimmune hemolytic anemia, idiopathic autoimmune hemolytic anemia, Refractory or chronic Autoimmune Cytopenias, Prevention of development of Autoimmune Anti-Factor VIII Antibodies in Acquired Hemophilia A, Cold Agglutinin Disease, Neuromyelitis Optica, Stiff Person Syndrome, gingivitis, periodontitis, pancreatitis, myocarditis, vasculitis, gastritis, gout, gouty arthritis, and inflammatory skin disorders, selected from the group consisting of psoriasis, atopic dermatitis, eczema, rosacea, urticaria, and acne, normocomplementemic urticarial vasculitis, inflammation of various parts of the heart, such as pericarditis, myocarditis, and endocarditis, lung and pleura inflammation, pleuritis, pleural effusion, chronic diffuse interstitial lung disease, pulmonary hypertension, pulmonary emboli, pulmonary hemorrhage, and shrinking lung syndrome, lupus headache, idiopathic pericarditis, myositis, demyelinating syndrome, mononeuropathy, mononeuritis multiplex, myelopathy, cranial neuropathy, polyneuropathy, collagenous colitis, lymphocytic colitis, ischaemia colitis, diversion colitis, indeterminate colitis, idiopathic autoimmune hemolytic anemia, anti-synthetase syndrome, scleritis, macrophage activation syndrome, Behçet's Syndrome, PAPA Syndrome, Blau's Syndrome, gout, gouty arthritis, inflammatory skin disorders selected from the group consisting of psoriasis, Non pustular Psoriasis including Psoriasis vulgaris and Psoriatic erythroderma (erythrodermic psoriasis), Pustular psoriasis including Generalized pustular psoriasis (pustular psoriasis of von Zumbusch), Pustulosis palmaris et plantaris (persistent palmoplantar pustulosis, pustular psoriasis of the Barber type, pustular psoriasis of the extremities), Annular pustular psoriasis, Acrodermatitis continua, Impetigo herpetiformis, drug-induced psoriasis, Inverse psoriasis, Napkin psoriasis, Seborrheic-like psoriasis, Guttate psoriasis, Nail psoriasis, eczema, rosacea, urticaria, and acne, normocomplementemic urticarial vasculitis, adult and juvenile Still's disease, cryropyrinopathy, chronic immune polyneuropathy, autoimmune thyroiditis, idiopathic diabetes, juvenile type ldiabetes, maturity onset diabetes of the young, latent autoimmune diabetes in adults, gestational diabetes, conditions relating to type 1 diabetes, membranous glomerulonephropathy, autoimmune gastritis, Muckle-Wells syndrome, familial cold-induced auto-inflammatory syndrome, neonatal onset multisystemic inflammatory disease, familial Mediterranean fever, chronic infantile neurologic, cutaneous and articular syndrome, any rheumatic disease, polymyalgia rheumatica, mixed connective tissue disease, inflammatory rheumatism, degenerative rheumatism, extra-articular rheumatism, juvenile arthritis, juvenile rheumatoid arthritis, systemic juvenile idiopathic arthritis, arthritis uratica, muscular rheumatism, chronic polyarthritis, reactive arthritis, Reiter's syndrome, rheumatic fever, relapsing polychondritis, Raynaud's phenomenon, vasculitis, cryoglobulinemic vasculitis, temporal arteritis, giant cell arteritis, Takayasu arteritis, Behcet's disease, chronic inflammatory demyelinating polyneuropathy, autoimmune thyroiditis, insulin dependent diabetes mellitus, type I diabetes, Addison's disease, membranous glomerulonephropathy, polyglandular autoimmune syndromes, Goodpasture's disease, autoimmune gastritis, autoimmune atrophic gastritis, pernicious anaemia, pemphigus, pemphigus vulgaris, cirrhosis, primary biliary cirrhosis, idiopathic pulmonary fibrosis, myositis, dermatomyositis, juvenile dermatomyositis, polymyositis, fibromyositis, myogelosis, celiac disease, celiac sprue dermatitis, immunoglobulin A nephropathy, Henoch-Schönlein purpura, Evans syndrome, atopic dermatitis, psoriasis, psoriasis vulgaris, psoriasis arthropathica, Graves' disease, Graves' ophthalmopathy, scleroderma, systemic scleroderma, progressive systemic scleroderma, diffuse scleroderma, localized scleroderma, Crest syndrome, asthma, allergic asthma, allergy, primary biliary cirrhosis, fibromyalgia, chronic fatigue and immune dysfunction syndrome (CFIDS), autoimmune inner ear disease, Hyper IgD syndrome, Schnitzler's syndrome, autoimmune retinopathy, age-related macular degeneration, atherosclerosis, chronic prostatitis, alopecia, alopecia areata, alopecia universalis, alopecia totalis, autoimmune thrombocytopenic purpura, idiopathic thrombocytopenic purpura, pure red cell aplasia, and TNF receptor-associated periodic syndrome (TRAPS).

[0289] Of particular interest in some embodiments is the treatment of rheumatoid arthritis, lupus, inflammatory bowel disease, psoriasis, multiple sclerosis and diabetes type I.

[0290] As described herein, PVRIG polypeptides which modulate immunity may optionally be used to treat or detect “immune related diseases (or disorders or conditions)”. These phrases or terms are used interchangeably and encompass any disease, disorder or condition selected from the group including but not limited to autoimmune diseases, inflammatory disorders, allergic disorders, e.g., chronic allergic disorders such as asthma, and immune disorders associated with graft transplantation rejection, such as acute and chronic rejection of organ or tissue transplantation, allogenic stem cell transplantation, autologous stem cell transplantation, bone marrow transplantation, and graft versus host disease.

[0291] As further noted, the present PVRIG polypeptides which modulate immunity may be used to treat “inflammatory disorders” and/or “inflammation”. These phrases or terms are used interchangeably herein and include e.g., inflammatory abnormalities characterized by dysregulated immune response to harmful stimuli, such as pathogens, damaged cells, or irritants. Inflammatory disorders underlie a vast variety of human diseases. Non-immune diseases with etiological origins in inflammatory processes include but are not limited to cancer, atherosclerosis, and ischemic heart disease. Examples of disorders associated with inflammation include but are not limited to: Chronic prostatitis, Glomerulonephritis, Hypersensitivities, Pelvic inflammatory disease, Reperfusion injury, Sarcoidosis, Vasculitis, Interstitial cystitis, normocomplementemic urticarial vasculitis, pericarditis, myositis, anti-synthetase syndrome, scleritis, macrophage activation syndrome, Behcet's Syndrome, PAPA Syndrome, Blau's Syndrome, gout, adult and juvenile Still's disease, cryropyrinopathy, Muckle-Wells syndrome, familial cold-induced auto-inflammatory syndrome, neonatal onset multisystemic inflammatory disease, familial Mediterranean fever, chronic infantile neurologic, cutaneous and articular syndrome, systemic juvenile idiopathic arthritis, Hyper IgD syndrome, Schnitzler's syndrome, TNF receptor-associated periodic syndrome (TRAPSP), gingivitis, periodontitis, hepatitis, cirrhosis, pancreatitis, myocarditis, vasculitis, gastritis, gout, gouty arthritis, and inflammatory skin disorders, selected from the group consisting of psoriasis, atopic dermatitis, eczema, rosacea, urticaria, and acne.

[0292] According to at least some embodiments, any one of the foregoing therapeutic agents according to the present invention can be used for adoptive immunotherapy. Immune tolerance or immunological tolerance or prolonged immunosuppression is the process by which the immune system does not attack an antigen. It can be either ‘natural’ or ‘self-tolerance’, where the body does not mount an immune response to self-antigens, or ‘induced tolerance’, where tolerance to external antigens can be created by manipulating the immune system. It occurs in three forms: central tolerance, peripheral tolerance and acquired tolerance. Without wishing to be bound by a single theory, tolerance employs regulatory immune cells—including Tregs—or potentially other immunosuppressive cells such as MDSCs, iMSCs, monocytes, neutrophils, macrophages, that directly suppress autoreactive cells, as well as several other immune cell subsets with immunoregulatory properties—including CD8⁺ T cells and other types of CD4⁺ T cells (Tr1, Th3), Th17 cells, in addition to natural killer (NK), NKT cells, dendritic cells (DC) and B cells.

[0293] Tolerance or prolonged immunosuppression can be induced by blocking costimulation or upon engagement of a co-inhibitory B7 with its counter receptor. Transfer of tolerance involves isolation of the cells that have been induced for tolerance either in vivo (i. e. prior to cell isolation) or ex-vivo, enrichment and expansion of these cells ex vivo, followed by reinfusion of the expanded cells to the patient. This method can be used for treatment of autoimmune diseases as recited herein, immune related diseases as recited herein, transplantation and graft rejection. Thus, according to at least some embodiments, the invention optionally provides methods for tolerance induction, comprising in vivo or ex vivo treatment administration of effective amount of any one of isolated soluble PVRIG polypeptide, or a polypeptide comprising the extracellular domain of PVRIG, or fragment thereof, or a fusion thereof to a heterologous sequence, to a patient or to leukocytes isolated from the patient, in order to induce differentiation of tolerogenic regulatory cells, followed by ex-vivo enrichment and expansion of said cells and reinfusion of the tolerogenic regulatory cells to said patient.

[0294] 1. Treating by Inhibiting the Interaction of PVRIG and PVRL2

[0295] In some embodiments, the invention provides methods of treating subjects by inhibiting the interaction of PVRIG and PVRL2, its associated ligand, as outlined in the examples. As both PVRIG and PVLR2 contain transmembrane domain, the inhibition can be done by preventing the binding of the two, such as by using anti-PVRIG antibodies. Alternately, by administering a soluble PVRIG polypeptide, that will interact with the transmembrane PVLR2 ligand, preventing it from binding to the membrane bound endogenous PVRIG, thus preventing signaling (either by the loss of signaling due to the lack of PVRIG signaling, or by the prevention of free PVLR2 binding to other of its signaling partners, such as DNAM1).

[0296] In some embodiments, the invention provides methods of treating patients by modulating the interaction of PVRIG and PVRL2 by administering a PVRIG polypeptide as outlined herein.

[0297] In some embodiments, the invention provides methods of treating patients by inhibiting the Interaction of PVRIG and PVRL2 by inhibiting the binding of PVRIG to PVLR2 by administering an anti-PVRIG antibody.

[0298] According to at least some embodiments, PVRIG therapeutic agents and/or a pharmaceutical composition comprising same, as described herein, which function as PVRIG agonizing therapeutic agents, may optionally be used for treating an immune system related disease. In some instances the immune system related condition comprises an immune related condition, including but not limited to autoimmune, inflammatory or allergic diseases such as recited herein, transplant rejection and graft versus host disease.

[0299] In some instances the immune condition is selected from autoimmune disease, inflammatory disease, allergic disease, transplant rejection, undesired gene or cell therapy immune responses, or graft versus host disease.

[0300] In some embodiments the treatment is combined with another moiety useful for treating immune related condition. Non limiting examples thereof include immunosuppressants such as corticosteroids, cyclosporin, cyclophosphamide, prednisone, azathioprine, methotrexate, rapamycin, tacrolimus, leflunomide or an analog thereof; mizoribine; mycophenolic acid; mycophenolate mofetil; 15-deoxyspergualine or an analog thereof; biological agents such as TNF-α blockers or antagonists, or any other biological agent targeting any inflammatory cytokine, nonsteroidal antiinflammatory drugs/Cox-2 inhibitors, hydroxychloroquine, sulphasalazopryine, gold salts, etanercept, infliximab, mycophenolate mofetil, basiliximab, atacicept, rituximab, cytoxan, interferon β-1a, interferon β-1b, glatiramer acetate, mitoxantrone hydrochloride, anakinra and/or other biologics and/or intravenous immunoglobulin (IVIG), interferons such as IFN-β1a (REBIF®. AVONEX® and CINNOVEX®) and IFN-β1b (BETASERON®); EXTAVIA®, BETAFERON®, ZIFERON®); glatiramer acetate (COPAXONE®), a polypeptide; natalizumab (TYSABRI®), mitoxantrone (NOVANTRONE®), a cytotoxic agent, a calcineurin inhibitor, e.g. Cyclosporin A or FK506; an immunosuppressive macrolide, e.g. Rapamycin or a derivative thereof; e.g. 40-O-(2-hydroxy)ethyl-rapamycin, a lymphocyte homing agent, e.g. FTY720 or an analog thereof, corticosteroids; cyclophosphamide; azathioprene; methotrexate; leflunomide or an analog thereof; mizoribine; mycophenolic acid; mycophenolate mofetil; 15-deoxyspergualine or an analog thereof; immunosuppressive monoclonal antibodies, e.g., monoclonal antibodies to leukocyte receptors, e.g., MHC, CD2, CD3, CD4, CD11a/CD18, CD7, CD25, CD27, B7, CD40, CD45, CD58, CD137, ICOS, CD150 (SLAM), OX40, 4-1BB or their ligands; or other immunomodulatory compounds, e.g. CTLA4-Ig (abatacept, ORENCIA®, belatacept), CD28-Ig, B7-H4-Ig, or other costimulatory agents, or adhesion molecule inhibitors, e.g. mAbs or low molecular weight inhibitors including LFA-1 antagonists, Selectin antagonists and VLA-4 antagonists, or another immunomodulatory agent.

[0301] In particular, treatment of multiple sclerosis using PVRIG immunoinhibitory proteins according to the invention may e.g., be combined with, any therapeutic agent or method suitable for treating multiple sclerosis. Non-limiting examples of such known therapeutic agent or method for treating multiple sclerosis include interferon class, IFN-β-1a (REBIF®. AVONEX® and CINNOVEX®) and IFN-β-1b (BETASERON®, EXTAVIA®, BETAFERON®, ZIFERON®); glatiramer acetate (COPAXONE®), a polypeptide; natalizumab (TYSABRI®); and mitoxantrone (NOVANTRONE®), a cytotoxic agent, Fampridine (AMPYRA®). Other drugs include corticosteroids, methotrexate, cyclophosphamide, azathioprine, and intravenous immunoglobulin (IVIG), inosine, Ocrelizumab (R1594), Mylinax (Caldribine®), alemtuzumab (Campath®), daclizumab (Zenapax®), Panaclar/dimethyl fumarate (BG-12), Teriflunomide (HMR1726), fingolimod (FTY720), laquinimod (ABR216062), as well as Hematopoietic stem cell transplantation, NeuroVax®, Rituximab (Rituxan®) BCG vaccine, low dose naltrexone, helminthic therapy, angioplasty, venous stents, and alternative therapy, such as vitamin D, polyunsaturated fats, medical marijuana.

[0302] Similarly, treatment of rheumatoid arthritis, using PVRIG immunoinhibitory proteins according to the invention may be combined with, for example, any therapeutic agent or method suitable for treating rheumatoid arthritis. Non-limiting examples of such known therapeutic agents or methods for treating rheumatoid arthritis include glucocorticoids, nonsteroidal anti-inflammatory drug (NSAID) such as salicylates, or cyclooxygenase-2 inhibitors, ibuprofen and naproxen, diclofenac, indomethacin, etodolac Disease-modifying antirheumatic drugs (DMARDs)-Oral DMARDs: Auranofin (Ridaura®), Azathioprine (Imuran®), Cyclosporine (Sandimmune®, Gengraf, Neoral, generic), D-Penicillamine (Cuprimine), Hydroxychloroquine (Plaquenil®), IM gold Gold sodium thiomalate (Myochrysine®) Aurothioglucose (Solganal®), Leflunomide (Arava®), Methotrexate (Rheumatrex®), Minocycline (Minocin®), Staphylococcal protein A immunoadsorption (Prosorba column), Sulfasalazine (Azulfidine®). Biologic DMARDs: TNF-α blockers including Adalimumab (Humira®) Etanercept (Enbrel®), Infliximab (Remicade®), golimumab (Simponi®), certolizumab pegol (Cimzia®), and other biological DMARDs, such as Anakinra (Kineret®), Rituximab (Rituxan®), Tocilizumab (Actemra®), CD28 inhibitor including Abatacept (Orencia®) and Belatacept.

[0303] Thus, treatment of IBD, using the agents according to at least some embodiments of the present invention may be combined with, for example, any known therapeutic agent or method for treating IBD. Non-limiting examples of such known therapeutic agents or methods for treating IBD include immunosuppression to control the symptom, such as prednisone, Mesalazine (including Asacol®, Pentasa®, Lialda®, Aspiro®, azathioprine (Imuran®), methotrexate, or 6-mercaptopurine, steroids, Ondansetron®, TNF-α blockers (including infliximab, adalimumab golimumab, certolizumab pegol), Orencia® (abatacept), ustekinumab (Stelara®), Briakinumab (ABT-874), Certolizumab pegol (Cimzia®), ITF2357 (Givinostat®), Natalizumab (Tysabri®), Firategrast® (SB-683699), Remicade® (infliximab), vedolizumab (MLN0002), other drugs including GSK1605786 CCX282-B (Traficet-EN®), AJM300, Stelara® (ustekinumab), Semapimod® (CNI-1493) tasocitinib (CP-690550), LMW Heparin MMX, Budesonide MMX, Simponi® (golimumab), MultiStem®, Gardasil® HPV vaccine, Epaxal® (virosomal hepatitis A vaccine), surgery, such as bowel resection, strictureplasty or a temporary or permanent colostomy or ileostomy; antifungal drugs such as nystatin (a broad spectrum gut antifungal) and either itraconazole (Sporanox) or fluconazole (Diflucan); alternative medicine, prebiotics and probiotics, cannabis, Helminthic therapy or ova of the Trichuris suis helminth.

[0304] Thus, treatment of psoriasis, using the agents according to at least some embodiments of the present invention may be combined with, for example, any known therapeutic agent or method for treating psoriasis. Non-limiting examples of such known therapeutics for treating psoriasis include topical agents, typically used for mild disease, phototherapy for moderate disease, and systemic agents for severe disease. Non-limiting examples of topical agents: bath solutions and moisturizers, mineral oil, and petroleum jelly; ointment and creams containing coal tar, dithranol (anthralin), corticosteroids like desoximetasone (Topicort), Betamethasone, fluocinonide, vitamin D3 analogues (for example, calcipotriol), and retinoids. Non-limiting examples of phototherapy: sunlight; wavelengths of 311-313 nm, psoralen and ultraviolet A phototherapy (PUVA). Non-limiting examples of systemic agents: biologics, such as interleukin antagonists, TNF-α blockers including antibodies such as infliximab (Remicade®), adalimumab (Humira®), golimumab, certolizumab pegol, and recombinant TNF-α decoy receptor, etanercept (Enbrel®); drugs that target T cells, such as efalizumab (Xannelim®/Raptiva®), alefacept (Ameviv®), dendritic cells such Efalizumab; monoclonal antibodies (MAbs) targeting cytokines, including anti-IL-12/IL-23 (ustekinumab (Stelara®)) and anti-Interleukin-17; Briakinumab® (ABT-874); small molecules, including but not limited to ISA247; immunosuppressants, such as methotrexate, cyclosporine; vitamin A and retinoids (synthetic forms of vitamin A); and alternative therapy, such as changes in diet and lifestyle, fasting periods, low energy diets and vegetarian diets, diets supplemented with fish oil rich in vitamin A and vitamin D (such as cod liver oil), fish oils rich in the two omega-3 fatty acids eicosapentaenoic acid (EPA) and docosahexaenoic acid (DHA) and contain vitamin E, ichthyotherapy, hypnotherapy, and cannabis.

[0305] Thus, treatment of type 1 diabetes, using the agents according to at least some embodiments of the present invention may be combined with, for example, any known therapeutic agent or method for treating type 1 diabetes. Non-limiting examples of such known therapeutics for treating type 1 diabetes include insulin, insulin analogs, islet transplantation, stem cell therapy including PROCHYMAL®, non-insulin therapies such as i1-1β inhibitors including Anakinra (Kineret®), Abatacept (Orencia®), Diamyd, alefacept (Ameviv®), Otelixizumab, DiaPep277 (Hsp60 derived peptide), α 1-Antitrypsin, Prednisone, azathioprine, and Cyclosporin, E1-INT (an injectable islet neogenesis therapy comprising an epidermal growth factor analog and a gastrin analog), statins including Zocor®, Simlup®, Simcard®, Simvacor®, and Sitagliptin® (dipeptidyl peptidase (DPP-4) inhibitor), anti-CD3 mAb (e.g., Teplizumab®); CTLA4-Ig (abatacept), anti-IL-1β (Canakinumab), Anti-CD20 mAb (e. g, rituximab) and combinations thereof.

[0306] Thus, treatment of uveitis, using the agents according to at least some embodiments of the present invention may be combined with, for example, any known therapeutic agent or method for treating uveitis. Non-limiting examples of such known therapeutics for treating uveitis include corticosteroids, topical cycloplegics, such as atropine or homatropine, or injection of PSTTA (posterior subtenon triamcinolone acetate), antimetabolite medications, such as methotrexate, TNF-α blockers (including infliximab, adalimumab, etanercept, golimumab, and certolizumab pegol).

[0307] Thus, treatment for Sjögren's syndrome, using the agents according to at least some embodiments of the present invention may be combined with, for example, any known therapeutic agent or method for treating for Sjögren's syndrome. Non-limiting examples of such known therapeutics for treating for Sjögren's syndrome include Cyclosporine, pilocarpine (Salagen®) and cevimeline (Evoxac®), Hydroxychloroquine (Plaquenil), cortisone (prednisone and others) and/or azathioprine (Imuran®) or cyclophosphamide (Cytoxan®), Dexamethasone, Thalidomide, Dehydroepiandrosterone, NGX267, Rebamipide®, FID 114657, Etanercept®, Raptiva®, Belimumab, MabThera® (rituximab); Anakinra®, intravenous immune globulin (IVIG), Allogeneic Mesenchymal Stem Cells (AlloMSC®), and Automatic neuro-electrostimulation by “Saliwell Crown”.

[0308] Thus, treatment for systemic lupus erythematosus, using the agents according to at least some embodiments of the present invention may be combined with, for example, any known therapeutic agent or method for treating for systemic lupus erythematosus. Non-limiting examples of such known therapeutics for treating for systemic lupus erythematosus include corticosteroids and Disease-modifying antirheumatic drugs (DMARD5), commonly anti-malarial drugs such as plaquenil and immunosuppressants (e.g. methotrexate and azathioprine) Hydroxychloroquine, cytotoxic drugs (e.g., cyclophosphamide and mycophenolate), Hydroxychloroquine (HCQ), Benlysta® (belimumab), nonsteroidal anti-inflammatory drugs, Prednisone, Cellcept®, Prograf®, Atacicept®, Lupuzor®, Intravenous Immunoglobulins (IVIGs), CellCept® (mycophenolate mofetil), Orencia®, CTLA4-IgG4m (RG2077), rituximab, Ocrelizumab, Epratuzumab, CNTO 136, Sifalimumab (MEDI-545), A-623 (formerly AMG 623), AMG 557, Rontalizumab, paquinimod (ABR-215757), LY2127399, CEP-33457, Dehydroepiandrosterone, Levothyroxine, abetimus sodium (LJP 394), Memantine®, Opiates, Rapamycin®, renal transplantation, stem cell transplantation and combinations of any of the foregoing.

[0309] The immunoinhibitory PVRIG therapeutic agents and/or a pharmaceutical composition comprising same, as recited herein, according to at least some embodiments of the invention, may be administered as the sole active ingredient or together with other drugs in immunomodulating regimens or other anti-inflammatory agents e.g. for the treatment or prevention of allo- or xenograft acute or chronic rejection or inflammatory or autoimmune disorders, or to induce tolerance.

### EXAMPLES

[0310] Specifically incorporated by reference herein is U.S. Ser. No. 62/141,168, filed 31 Mar. 2015, and U.S. Ser. No. 62/118,235, filed 19 Feb. 2015, in their entirety, and in particular for the Examples therein, and for the associated Figures and Legends.

### Example 1: Expression Analysis of PVRIG Proteins

[0311] Specifically incorporated by reference herein is U.S. Ser. No. 62/141,168, filed 31 Mar. 2015, and U.S. Ser. No. 62/118,235, filed 19 Feb. 2015, in their entirety, and in particular for the Examples therein, and for the associated Figures and Legends.

### Example 1A

[0312] The GD S3113 data set (http://www.ncbi.nlm.nih.gov/sites/GDSbrowser?acc=GDS3113) was analyzed to identify genes with a lymphoid organ specific pattern. PVRIG was identified as lymphocyte specific due to high expression in primary and secondary lymphoid organs, which include peripheral blood, bone marrow, spleen, lymph nodes, tonsil and thymus (FIG. 2). Other tissue types were negative or showed expression at background levels. In order to investigate which specific cell types within the total population of immune cells express PVRIG, additional data sets form the Gene Expression Omnibus (www.ncbi.nlm.nih.gov/GEO) were analyzed, as described in “methodology” section herein. The analysis was performed on immune cell populations derived from peripheral blood and bone marrow. PVRIG was expressed in lymphocytes both in the B-cell linage and the T-cell linage including CD8 T-cells naïve, effector and memory (FIG. 3). In addition, PVRIG was expressed in NK cells and had the highest expression in the iNKT population (FIG. 4). The iNKT population of lymphocytes act as potent activators of antitumor immunity when stimulated with a synthetic agonist in experimental models. However, in some settings, iNKT cells can act as suppressors and regulators of antitumor immunity (Clin Dev Immunol. 2012; 2012:720803). Furthermore, in early clinical trials of iNKT cell-based immunotherapy demonstrated that the infusion of ligand-pulsed antigen presenting cells treatment of and/or in vitro activated iNKT cells were safe and well tolerated in lung cancer and head and neck cancer (Clin Immunol. 2011 August; 140(2): 167-76.).

[0313] A key question in regards to PVRIG expression was whether Tumor Infiltrating Lymphocytes (TILs) retain expression of PVRIG in the tumor microenvironment. Analyzing expression data of TILs form follicular lymphoma, breast cancer and colon cancer showed clear expression of PVRIG in the TILs infiltrating the tumor. In the colon cancer example the specificity to the immune infiltrating cells was seen as the expression is found only in the CD45 positive population (leukocyte specific marker), and no expression is found in EPCAM positive population (epithelial specific marker) or in the CD45 negative EPCAM negative (stromal cell population). Although the CD45 is not a lymphocyte specific marker, the other expression description infers that it is expressed on the lymphocyte population (FIG. 5A colon cancer, FIG. 5B breast cancer and FIG. 5C follicular lymphoma).

[0314] The mRNA expression data shown herein indicates that PVRIG is expressed in lymphocytes and in tumor infiltrating lymphocytes (TILs). These results together with PVRIG inhibitory activity propose an inhibitory role of the molecule in T-cells, suggesting that inhibitory antibodies to PVRIG elevates PVRIG's suppressive role on the TILs and thus enable the TILs to induce an immune response against cancer. As the proposed mechanism of action is directed to the TILs infiltrating the tumor, rather than direct effect on the tumor cells, any cancer with immune infiltration is candidate for treatment using PVRIG inhibitory antibodies.

[0315] Methodology: Raw data is downloaded from the GEO site in SOFT format. In cases where the raw data was in MAS5 format, the data was taken without manipulation. If the data was in Log MAS5 then the data was converted to linear data. If the data was in RMA format CEL files (raw data) were downloaded and re-analyzed using MAS5. If raw CEL files were not available the RMA format was used.

[0316] Data was then normalized by multiplicative according to the 95th percentile for Affy data. Datasets analyzed: GSE49910, GSE47855, GSE39397, GSE36765, GSE27928.

[0317] Specifically incorporated by reference herein is U.S. Ser. No. 62/141,168, filed 31 Mar. 2015, and U.S. Ser. No. 62/118,235, filed 19 Feb. 2015, in their entirety, and in particular for the Examples therein, and for the associated Figures and Legends.

### Example 1B

[0318] A transcriptome reference was generated based on UCSC know genes models (http://hgdownload.cse.ucsc.edu/goldenPath/hg19/database/knownGene.txt.gz). All RNA sequencing reads were aligned to the transcriptome sequences first. This alignment allowed for non-unique mapping because isoforms share many exons. Each read was then assigned genomic coordinates and exon junctions based on the transcriptome matching. The remaining unmapped reads were aligned directly to the genome by considering one or more exon junctions. Finally, read counts were normalized as described by Bo et al. (Bioinformatics 2010, 26 (4): 493-500) and converted to gene expression values as described by Trapnell et al (Nat Biotechnol. 2010 May; 28(5):511-5).

[0319] As shown in FIG. 6, based on Genotype-Tissue Expression (GTEx) data (http://www.nature.com/ng/journal/v45/n6/full/ng.2653.html; http://www.gtexportal.org/home/), PVRIG is expressed mainly in blood cells and to lesser extent in various normal tissues. The same results were observed in cancerous tissues from The Cancer Genome Atlas (TCGA) (http://cancergenome.nih.gov/) in which high expression are seen in blood cancers like B-cell lymphomas and AML (FIG. 7). A gene expression signature was generated for a variety of cancers and normal tissues using GTEx and TCGA data by identifying genes with a highly correlated expression pattern to PVRIG.

[0320] The correlation analysis was conducted per tumor type and only correlations where both genes were expressed above 0 RPKM with at least 50 samples in the same tumor type, were considered. These gene expression signatures were tested for enrichment of interacting proteins, pathways and disease genes. Enrichment p-values were calculated for each tumor type and the mean −log(p-value) was used to rank the scoring gene sets. A clear signature of lymphocytes and T-cells was observed in a variety of cancers, as shown in. For instance, the top scoring gene in protein interaction was IL2, meaning that genes known to interact with IL2 are more correlated with PVRIG than expected by chance across most cancers. Further analysis showed that PVRIG expression in cancer tissues are higher than normal. While in FIG. 5 the median expression level of PVRIG is below 1 across most normal solid tissues, in FIG. 6 it is clearly higher than 1 in many cancers. As an example, when compared side by side in FIG. 7, melanoma PVRIG was expressed higher than normal skin (FIG. 9). We further characterized the source of over-expression in cancer. PVRIG is highly expressed in T cells and is highly correlated to markers of T cells in cancer. In FIG. 10, PVRIG correlation to CD3, CD4 and CD8 are shown as an example in three cancer types, namely, lung adenocarcinoma, colon adenocarcinoma and melanoma. In addition, PVRIG is highly correlated to PD1, a validated target for immunotherapy in cancer known to be expressed on T cells (FIG. 10).

[0321] These gene expression signatures were tested for enrichment of interacting proteins, pathways and disease genes. A clear signature of lymphocytes and T-cells was observed in a variety of cancers, as shown in FIG. 8. We further analyzed the correlation of PVRIG to PD1 and showed high correlation between their expression in various tumors including breast lung pancreas and kidney (Table 2). Both PD-1 and PVRIG are highly expressed on activated T cells. PVRIG showed high correlation with T cell markers in cancer, namely, CD8A, CD4 and CD3G (FIG. 13). Taken together, these data demonstrate that cancer expression of PVRIG is associated with tumor infiltrating lymphocytes.

[0322] Methods: Genes correlation: FPKM values were transformed to log 2 (FPKM+0.1). Samples with value that fulfills log 2 (FPKM+0.1)<log 2(0.1) for at least one of the genes, were omitted. Pearson Correlation Coefficient (PCC) and the Least Squared Estimators for the regression line were computed for the 2 lists (one list per gene). PCCs with lower value than 0.5 were omitted as well as PCCs that failed to show significant value when testing the linear correlation between the expression levels of the 2 genes.

[0323] Gene Enrichment analysis: Pathway, interaction and disease data were obtained from GeneGo Metacore (https://portal.genego.com), Reactome (http://www.reactome.org) and KEGG Pathways (http://www.genome.jp/kegg). To identify pathways and processes that were enriched within a given gene list, a hyper-geometric-based enrichment analysis was implemented. The hyper-geometric p-value was calculated using the R program (http://www.R-project.org) with the following command: phyper(x−l, m, n−m, k and lower.tail=FALSE), where x is the number of genes from the gene list that are members of the pathway, m is the number of genes in the pathway, n is the total number of unique genes in all pathways, and k is the number of genes from the list that were present in at least one pathway. The resulting p-value is indicative of the likelihood of enriching for a specific pathway by chance given the size of the gene list. The same analytical procedure was applied to gene interactions where all genes interacting with a given gene were treated as a pathway; or genes associated with a disease where all associated genes were treated as a pathway. See FIGS. 64A and 64B.

[0324] PVRIG expression was associated with exhausted T cells in cancer. Cancer samples from TCGA were chosen that have high (4th quartile) expression of the following 4 markers: CD8, PD-1, TIM-3 and TIGIT. Cancer samples were then divided to high, no change and low levels of the combined expression of the 4 markers. PVRIG was not detected in any of the low expressing markers (low or no exhausted T cells). The vast majority of tumors associated with high levels of exhausted T cells expressed high levels of PVRIG (FIG. 22).

[0325] Specifically incorporated by reference herein is U.S. Ser. No. 62/141,168, filed 31 Mar. 2015, and U.S. Ser. No. 62/118,235, filed 19 Feb. 2015, in their entirety, and in particular for the Examples therein, and for the associated Figures and Legends.

### Example 1C

[0326] The expression of human and non-human primate PVRIG RNA and protein in cell lines and primary leukocytes was evaluated.

### Protocols

[0327] FACS analysis of engineered over-expressing cells: The following cell lines were used to assess the specificity of anti-human PVRIG antibodies: HEK parental and HEK hPVRIG over-expressing cells. These cells were cultured in DMEM (Gibco)+10% fetal calf serum (Gibco)+glutamax (Gibco). For the HEK hPVRIG over-expressing cells, 0.5 μg/ml puromycin (Gibco) was also added to the media for positive selection. For FACS analysis, all cell lines were harvested in log phase growth and 50,000-100,000 cells per well were seeded in 96 well plates. Anti-human PVRIG antibodies (human IgG1, hIgG1) and their respective controls were added in single point dilutions (5 μg/ml), or as an 8 point titration series starting at 30 μg/ml on ice for 30 mins-1 hr. The titration series were conducted as either 1:3 or 1:3.3 fold serial dilutions. Data was acquired using a FACS Canto II (BD Biosciences) and analyzed using FlowJo (Treestar) and Prism (Graphpad) software.

[0328] FACS analysis of human cell lines: The following cell lines were used to assess the expression and specificity of anti-human PVRIG antibodies: Jurkat, CA46, NK-92, OV-90, HepG2, and NCI-H441. Jurkat, CA46, and NCI-H441 cells were cultured in RPMI media+10% fetal calf serum, glutamax, non-essential amino acids (Gibco), sodium pyruvate (Gibco), and penicillin/streptomycin (Gibco). NK-92 cells were cultured in RPMI media+25% fetal calf serum, glutamax, non-essential amino acids, sodium pyruvate, penicillin/streptomycin, and 500 U/ml IL-2 (R&D systems). OV-90 cells were cultured in a 1:1 mixture of MCDB 105 media (Sigma) containing a final concentration of 1.5 g/L sodium bicarbonate (Life Technologies) and Media 199 (Sigma) containing a final concentration of 2.2 g/L sodium bicarbonate with a final concentration of 15% fetal calf serum. HepG2 cells were cultured in DMEM+10% fetal calf serum+glutamax. For FACS analysis, all cell lines were harvested in log phase growth and 50,000-100,000 cells per well were seeded in 96 well plates. Anti-human PVRIG antibodies (hIgG1) and their respective controls were added in single point dilutions (5 μg/ml), or as an 8 point titration series starting at 30 μg/ml on ice for 30 mins-1 hr. The titration series were conducted as either 1:3 or 1:3.3 fold serial dilutions. Data was acquired using a FACS Canto II and analyzed using FlowJo and Prism software.

[0329] FACS analysis of naïve human primary leukocytes: Primary leukocytes were obtained by Ficoll (GE Healthcare) gradient isolation of peripheral blood (Stanford Blood Bank). Leukocytes as isolated peripheral blood mononuclear cells (PBMC) were frozen down in liquid nitrogen at a density between 1×107 and 5×107 cells/ml in a 10% DMSO (Sigma), 90% fetal calf serum mixture. To assess protein expression of PVRIG on PBMC, antibody cocktails towards major immune subsets were designed that included human anti-PVRIG antibodies. Anti-human PVRIG antibodies (hIgG1) and their respective controls were added in single point dilutions (5 μg/ml), or in some cases, as an 8 point titration series starting at 10 or 30 μg/ml on ice for 30 mins-1 hr.

[0330] Briefly, antibody cocktail mixtures were added to resuscitated PBMC that were seeded at 5×10⁵-1×10⁶ cells/well upon prior Fc receptor blockade and live/dead staining (Aqua Live/Dead, Life Technologies). Antibody cocktails were incubated with PBMC for 30 mins-1 hr on ice. PBMC were then washed and data was acquired by FACS using a FACS Canto II. Data was analysed using FlowJo and Prism software. Immune subsets that were analysed include CD56 dim NK cells, CD56 bright NK cells, CD4+ T cells, CD8+ T cells, non-conventional T cells (e.g. NKT cells and γδ T cells), B cells, and monocytes.

[0331] FACS analysis of activated human effector lymphocytes: In some cases, expression of PVRIG was assessed on activated effector lymphocyte subsets either isolated from whole PBMC or in whole PBMC preparations. Effector lymphocytes were stimulated with combinations of cytokines, combinations of antibodies and cytokines, or pathogenic products. FACS analysis of PVRIG expression on activated cells was performed analogous to that described above for naïve primary leukocytes.

[0332] To study PVRIG expression on stimulated NK cells, CD56+ cells were isolated and cultured in various cocktails of cytokines for 1-3 days in NK cell media (RPMI+10% fetal calf serum, glutamax, penicillin/streptomycin, non-essential amino acids, sodium pyruvate, and beta-mercaptoethanol [Gibco]). NK cells were sorted either using anti-human CD56+ microbeads (Miltenyi Biotec) or the human NK cell isolation kit (Miltenyi Biotec) according to the manufacturer's instructions. Cocktails of cytokines used to simulate NK cells included IL-2, IL-12, IL-15, IL-2/IL-12, IL-2/IL-15, IL-12/IL-15 (R&D systems).

[0333] To study PVRIG expression on stimulated T cells, CD4+ or CD8+ T cells were isolated using CD4+ or CD8+ microbeads (Miltenyi Biotec). The isolated cells were cultured for 3 days in the presence of various activating conditions in T cell media (RPMI+10% fetal calf serum, glutamax, penicillin/streptomycin, non-essential amino acids, sodium pyruvate). Conditions used to stimulate isolated T cells include human dynabead stimulation (beads coupled to CD3/CD28 antibodies, Life Technologies) with IL-2 or cytokine cocktails that drive T cells to certain phenotypes (e.g. Th1, Th2, Th17, and T regulatory phenotypes). Th1 driving cytokines are recombinant IL-12 (R&D systems) and an anti-IL-4 neutralizing antibody (Biolegend). Th2 driving conditions are recombinant IL-4 (R&D systems) and an anti-IFN-gamma neutralizing antibody (Biolegend). Th17 driving conditions are recombinant IL-6 (R&D systems), TGF-beta (R&D systems), IL-23 (R&D systems), and anti-IL-4 and anti-IFNγ neutralizing antibodies. T regulatory driving conditions are recombinant TGF-beta and IL-2, and anti-IL-4 and anti-IFNγ neutralizing antibodies.

[0334] Alternatively, activated T cells were also analyzed in whole stimulated PBMC cultures with staphylococcal enterotoxin B (SEB) antigen (List Biological Laboratories) for 3 days, or in a mixed lymphocyte reaction (MLR) where CD4+ T cells are co-cultured with allogeneic dendritic cells for 2 or 5 days.

[0335] FACS analysis of human polarized monocytes: PVRIG expression was assessed on dendritic cells derived from polarized monocytes. In this instance, CD14+ cells were enriched using RosetteSep human monocyte enrichment according to manufacturer's instructions. After CD14+ cell enrichment, monocytes were polarized to dendritic cells upon culture with GM-CSF (R&D systems) and IL-4 (R&D systems) for 4 days in RPMI+10% fetal calf serum, glutamax, penicillin/streptomycin, non-essential amino acids, sodium pyruvate, and beta-mercaptoethanol.

[0336] RNA expression analysis of human cell lines and leukocytes by qPCR: Cell lines that were assessed for RNA expression by qPCR were Jurkat, CA46, Daudi, Raji, and expi 293 cells. Jurkat, CA46, Raji, and Daudi cells were cultured in RPMI media+10% fetal calf serum, glutamax, non-essential amino acids, sodium pyruvate, and penicillin/streptomycin. Expi 293 cells were cultured in DMEM+10% FCS+glutamax. OV-90, HepG2, and NCI-H441 RNA was analysed by a bioinformatics screen of the cancer cell line atlas. For those cell lines that were assessed for RNA expression by qPCR, the cells were harvested in log phase growth and 1,000,000 cells were harvested, washed in PBS, and lysed in 350 ul of RLT buffer (Qiagen). Lysed cells in RLT buffer were stored at −80° C. until use.

[0337] Primary leukocytes that were assessed for RNA expression were CD56+NK cells, CD4+ T cells, CD8+ T cells, and CD14+ monocytes. Cell populations were isolated using human CD56+, CD4+, CD8+, and CD14+ positive selection kits according to manufacturer's instructions (Miltenyi Biotec). After sorting, cells were lysed in 350 ul of RLT buffer and stored at −80° C. until use. In some instances, activated PBMC subsets (activation conditions outlined above) were harvested from culture and were lysed in 350 ul of RLT buffer and stored at −80° C. until use.

[0338] Upon day of use, RNA was generated from lysed cells using the Qiagen mini kit according to the manufacturer's instructions. cDNA was generated using Applied Biosystems high capacity cDNA reverse transcription kit. qPCR using cDNA was performed using Taqman primers (ThermoFisher) and Applied Biosystems Taqman fast advanced mastermix. The PVRIG primer set used was Taqman catalogue number: Hs04189293_g1. Beta-actin housekeeping primer set used was Taqman catalogue number: Hs01060665_g1. Expression of transcript was assessed by quantifying Ct values and relative expression was calculated by the 2(−ΔΔCt) method. Data was acquired on an Applied Biosystems Step One Plus instrument.

[0339] FACS analysis of cynomolgus PVRIG engineered over-expressing cells: The following cell lines were used to assess the cross-reactivity of anti-human PVRIG antibodies with cynomolgus PVRIG (cPVRIG): expi parental and expi cPVRIG over-expressing cells. These cells were cultured in DMEM+10% fetal calf serum+glutamax. expi cPVRIG transient over-expressing cells were generated by electroporating cPVRIG DNA into parental expi cells using the Neon transfection system. For FACS analysis, expi cPVRIG cells were used between 1-3 days post transfection. Parental expi cells were harvested from log growth phase. 50,000-100,000 cells of per well of each type were seeded in 96 well plates. Anti-human PVRIG antibodies (hIgG1) and their respective controls were added in single point dilutions (5 μg/ml), or as an 8 point titration series starting at 100 μg/ml on ice for 30 mins-1 hr. The titration series were conducted as either 1:3 or 1:3.3 fold serial dilutions. Data was acquired using a FACS Canto II and analyzed using FlowJo and Prism software.

[0340] FACS analysis of naïve primary cynomolgus monkey leukocytes: Primary cynomolgus monkey (cyno) leukocytes were obtained from fresh blood which was drawn no longer than 24 hours prior to expression analysis. Blood was sourced from Bioreclamation. To assess protein expression of PVRIG on cyno PBMC, antibody cocktails towards major immune subsets were designed that included human anti-PVRIG antibodies. Anti-human PVRIG antibodies (hIgG1) and their respective controls were added in single point dilutions (5 μg/ml).

[0341] Briefly, antibody cocktail mixtures were added to PBMC that were seeded at 5×10⁵-1×10⁶ cells/well upon prior Fc receptor blockade and live/dead staining. Antibody cocktails were incubated with PBMC for 30 mins-1 hr on ice. PBMC were then washed and data was acquired by FACS using a FACS Canto II. Data was analysed using Prism software. Immune subsets that were analysed include CD16+ lymphocytes, CD14+/CD56+ monocytes/myeloid cells, and CD3+ T cells.

[0342] RNA expression analysis of primary cynomolgus monkey leukocytes: Primary leukocytes that were assessed for RNA expression were CD56+, CD16+, and CD56−/CD16-subsets. Cell populations were isolated using non-human primate CD56 and CD16 positive selection kits according to manufacturer's instructions (Miltenyi Biotec). After sorting, cells were lysed in 350 ul of RLT buffer and stored at −80° C. until use.

[0343] Upon day of use, RNA was generated from lysed cells using the Qiagen mini kit according to the manufacturer's instructions. cDNA was generated using Applied Biosystems high capacity cDNA reverse transcription kit. qPCR using cDNA was performed using Taqman primers and Applied Biosystems Taqman fast advanced mastermix. Two sets of primers to detect cyno PVRIG were designed by Compugen USA, Inc and manufactured by Genscript. The sequence and primer codes are:

Primer set 1
Forward:
(SEQ ID NO: 1543)
CTTGTGTTCACCACCTCTGG
Reverse:
(SEQ ID NO: 1544)
TGTTCTCATCGCAGGAGGTC
Primer set 2
Forward:
(SEQ ID NO: 1545)
TTGGCTGTGGATACCTCCTT
Reverse:
(SEQ ID NO: 1546)
ATAAGGGTCGTGGAGAGCAG

[0344] Beta-actin primers were used for housekeeping and the primer set used was Taqman catalogue number: Mf04354341_g1. Expression of transcripts was assessed by quantifying Ct values and relative expression was calculated by the 2^{(-ΔΔCt)} method. Products generated with PVRIG primers and beta-actin primers were also size analysed by traditional RT-PCR using a 2.5% agarose gel. qPCR data was acquired using an Applied Biosystems Step One Plus instrument.

### Results

[0345] PVRIG antibodies recognize PVRIG on overexpressing cells: To screen for antibodies that were specific for PVRIG, we assessed the ability of antibodies that were generated from a phage campaign to bind HEK cell lines that were engineered to overexpress PVRIG. The majority of antibodies from this campaign upon reformatting to human IgG1 bound to the HEK hPVRIG cells, albeit with varying affinity. Furthermore, the majority of these antibodies also showed low background binding to HEK parental cell lines indicating high specificity towards PVRIG. FIG. 27 shows one example of the specificity of PVRIG antibodies. A summary of all binding characteristics of the antibodies towards HEK hPVRIG cells relative to control that were generated in this phage campaign are displayed in FIGS. 31A-31B.

[0346] Human PVRIG RNA is expressed in a range of cancer cell lines: To initially screen for cell lines that could be used to assess PVRIG protein expression by antibodies, we examined the cancer cell line atlas for cell lines that were high for PVRIG RNA as assessed by bioinformatics. We found four cell lines that were readily accessible commercially that were high expressors for PVRIG RNA that we chose to validate by qPCR analysis. These cell lines were Jurkat, CA46, Raji, and Daudi.

[0347] When qPCR analysis was conducted, we detected PVRIG RNA in all four cell lines consistent with the bioinformatics analysis (FIG. 28). As a negative control we included expi cells that had relatively low PVRIG RNA expression.

[0348] Human PVRIG RNA is expressed in T cells and NK cells: To initially screen PBMC for subsets likely to be positive for PVRIG protein as detected by our antibodies, we sorted major PBMC subsets and examined PVRIG RNA expression by qPCR. Levels of PVRIG RNA in CD56+NK cells, CD4+ T cells, CD8+ T cells, and CD14+ monocytes were compared to those in Jurkat, HEK parental, and HEK hPVRIG cell lines. As shown in FIG. 29, PVRIG RNA was detected most highly and up to 50 fold higher in CD4+ T cells, CD8+ T cells, and CD56+NK cells when normalized to HEK GFP cells. Similar to FIG. 28, Jurkat cells also showed positive expression. In contrast, CD14+ monocytes did not show higher PVRIG expression relative to HEK GFP cells indicating very low PVRIG RNA expression.

[0349] In addition to analyzing naïve PBMC, select populations (effector lymphocytes) were also activated under various stimulatory conditions and expression of PVRIG RNA was assessed. More specifically, NK cells were activated with various combinations of stimulatory cytokines, whereas T cells were polyclonally activated with human activator dynabeads or staphylococcus enterotoxin B (SEB) with or without polarizing cytokines (see protocol section for details). As shown in FIGS. 30A and B, PVRIG RNA expression generally increased in both NK cells and T cells upon various stimulation conditions, the extent of which depended on the individual donor. More specifically, FIG. 30a shows PVRIG RNA expression in naïve and activated CD4 T cells and NK cells. FIG. 30b shows PVRIG RNA expression in naïve and activated CD8 T cells.

[0350] PVRIG antibodies recognize PVRIG protein on NK cells most prominently in naïve and activated primary immune subsets: Upon confirming the RNA expression pattern of PVRIG RNA expression in naïve and activated PBMC subsets, we used our panel of PVRIG antibodies to assess protein expression. We first assessed PVRIG expression in naïve PBMC subsets. The population which displayed the highest level of PVRIG was NK cells. CD4+ and CD8+ T cells showed low levels of PVRIG, while B cells and monocytes had no detectable expression. A summary of expression on NK cells and CD8+ T cells as detected by our antibodies is shown in FIGS. 32A and 32B. Other minor subsets also displayed PVRIG expression and included non-conventional T cells such as NKT cells and γδ T cells. The expression pattern on PBMC subsets was very similar across all donors we sourced and analyzed.

[0351] When PVRIG protein was assessed after various stimulation conditions (including polyclonal simulation, cytokine stimulation, and MLR), there was no robust up-regulation of PVRIG on any PBMC subsets, including NK cells and CD4+ and CD8+ T cells. Furthermore, monocytes which were polarized in vitro to dendritic cells with GM-CSF and IL-4 did not show detectable PVRIG expression consistent with that seen on non-polarized monocytes.

[0352] PVRIG is detected on cell lines by a proportion of PVRIG antibodies: In addition to screening PBMC for PVRIG protein expression, we wanted to understand whether it was also expressed on cancer cell lines. Using the positive cell lines identified by RNA expression (FIG. 28), we chose to screen our antibodies on Jurkat and CA46 cells as they showed the lowest absolute Ct values relative to our housekeeping gene. We also chose a range of negative cell lines to further validate the specificity of our antibodies which included OV-90, NCI-H441, and HepG2. A proportion of our antibodies did detect PVRIG protein expression on Jurkat and CA46 cells (FIGS. 31A and 31B), but not the negative cell lines. An example of PVRIG detection on Jurkat and CA46 is shown in FIG. 33 with a representative antibody, CPA.7.021. The expression on Jurkat and CA46 was completely in accordance with each other and the intensity of expression was similar across the two cell lines.

[0353] PVRIG antibodies detect cynomolgus PVRIG transiently expressed on expi cells: In order to assess the pre-clinical suitability of our anti-human PVRIG antibodies for pharmacological studies in cynomolgus monkey, we wanted to understand whether our antibodies were able to cross-react with cynomolgus PVRIG (cPVRIG). A proportion of our antibodies were able to detect cPVRIG which was transiently transfected onto expi cells (FIG. 29). An example of an antibody that yielded negative staining (CPA.7.021) and one that yielded positive staining (CPA.7.024) are shown in FIGS. 34A-34D.

[0354] PVRIG RNA is detected in cynomolgus PBMC: Prior to assessment of PVRIG protein on cyno PBMC, we firstly wanted to determine the PVRIG RNA expression profile in cyno PBMC subsets. As no cPVRIG primers set existed, we designed two sets that were directed at two distinct sites on the cPVRIG gene. One primer set was specific for the X2 variant of cPVRIG, while the other set was able to pick up both the X1 and X2 variant. As shown in FIG. 35, both primer sets were able to detect cPVRIG RNA at a similar level when compared to each other. Furthermore, unlike human PBMC where there was a distinct PVRIG RNA signature in effector lymphocytes (NK and T cells) compared to monocytes, cPVRIG RNA was expressed at a similar level across all PBMC subsets from all donors assessed.

[0355] PVRIG protein expression on cynomolgus PBMC is very low or negative: Having established a cPVRIG RNA profile for cyno PBMC, we screened for the presence of cPVRIG protein on cyno PBMC using a select panel of anti-human PVRIG antibodies. The antibodies chosen to screen PBMC were based on their ability to bind cPVRIG transient cells and/or functional activity. As shown in FIGS. 36A-36C, we were able to detect low level of expression of cPVRIG on the CD16+ lymphocyte subset (NK cells) from a range of antibodies, but not the CD3+ lymphocyte subset (T cells) nor the CD14+CD56+ myeloid subset (monocytes). Despite this data, those antibodies that showed positive detection over control (as denoted by the solid black line) did not correlate to those that were able to bind the cPVRIG transient cells. For example, the level of staining by CPA.7.021 was more than CPA.7.024 despite the former not binding to cPVRIG transient cells (see FIGS. 36A-36C).

[0356] Summary and Conclusions: Using an antibody phage platform, we have been able to successfully generate monoclonal antibodies towards the human PVRIG antigen. Using engineered over-expressing cells as well as a suite of cancer cell lines, we showed that our antibodies are highly specific to the PVRIG antigen, and are able to detect protein expression which correlated with RNA expression. Upon analysis of human PBMC subsets, we showed that the PVRIG protein is most highly expressed on NK cells, with low expression on conventional CD3+ T cells, and not detectable on B cells and myeloid cells. The expression did not robustly change upon exposing these cell types to various stimulation conditions. We also showed that a panel of our antibodies are cross-reactive with the cynomolgus monkey (cyno) PVRIG antigen through assessing their binding to over-expressing cells. However, the combination of the low level of binding of this panel of antibodies to cyno PBMC, the lack of protein correlation with RNA, and the discordance of their ability to bind to over-expressing cells (compared to PBMC) indicates that the PVRIG antigen on cyno PBMC may be very low/negative, or it is expressed in a different/more complex form compared to the over-expressing cells.

[0357] Specifically incorporated by reference herein is U.S. Ser. No. 62/141,168, filed 31 Mar. 2015, and U.S. Ser. No. 62/118,235, filed 19 Feb. 2015, in their entirety, and in particular for the Examples therein, and for the associated Figures and Legends.

### Example 1D

[0358] Expression of PVRIG in PBMC subsets from healthy donors: The expression of PVRIG in PBMC subsets from healthy donors was tested (gating strategy is shown in FIG. 1a). In the tested samples, PVRIG was shown to express on CD8+ T cells (data not shown), CD8α+γδ T cell (data not shown), double-negative γδ T cells (data not shown) and to a milder extent also on CD4+ T cells (data not shown) of healthy donors PBMCs (n=5).

[0359] Specifically incorporated by reference herein is U.S. Ser. No. 62/141,168, filed 31 Mar. 2015, and U.S. Ser. No. 62/118,235, filed 19 Feb. 2015, in their entirety, and in particular for the Examples therein, and for the associated Figures and Legends.

### Example 1E

[0360] Co-expression of PVRIG with PD1, TIGIT and HLA-DR in Ovarian Cancer ascites, PBLs of MSS, CRC, and in resting and allo-activated healthy PBMCs: PVRIG is co-expressed with TIGIT on CD8+ T cells in ovarian cancer ascites (data not shown). In this sample, a mixed level of PVRIG expression was observed, that overlapped with that of PD-1 expression. Low level of HLA-DR correlated with low level of PVRIG expression. Very low level of PVRIG was observed on CD4+ T cells is in this specific sample, indicating no correlation with PD1, TIGIT and HLA-DR.

[0361] In PBLs of MSS CRC patients, PVRIG is co-expressed with TIGIT on CD8+ T cells (data not shown). Low expression levels of PVRIG were observed in this sample which was in correlation with the low levels of TIGIT and HLA-DR. TILs from this patient had small CD8+ population that stained positive for surface PVRIG, which was also positive for PD1 and TIGIT (data not shown). Intracellular stain reveled prominent PVRIG stain that mirrored the expression pattern of PD-1, showing two distinct populations that are PD1-PVRIG- and PD1+PVRIG+(data not shown). Intracellular PVRIG+CD8+ T cells seem to better correlate with the HLA-DR+ and TIGIT+. PVRIG was not detectable on the surface of CD4+ T cells and only minority of the CD4+ cells showed positive intracellular PVRIG stain in the PD1+ population. Due to the very small intracellular PVRIG+ population, it is difficult to determine if PVRIG is co-expressed with TIGIT and HLA-DR.

[0362] In healthy PBMCs, PVRIG stain on CD8 T cells mirrored the expression pattern of PD-1 and TIGIT, showing distinct PD1-PVRIG- and PD1+PVRIG+ populations and distinct TIGIT-PVRIG- and TIGIT+PVRIG+ populations (data not shown). PVRIG was not detected on CD4+ cells. Interestingly, following allo-activation, co-expression of PVRIG and PD-1 was observed on CD4+(but no on CD8+) (data not shown).

[0363] In summary, PVRIG was shown to co-express with TIGIT in CD8+ T cells from ovarian cancer ascites, MSS CRC patient's PBLs and with PD-1 healthy donor's PBMCs and with PD1 in CD4+ T cells of allo activated PBMCs from healthy donor.

[0364] Specifically incorporated by reference herein is U.S. Ser. No. 62/141,168, filed 31 Mar. 2015, and U.S. Ser. No. 62/118,235, filed 19 Feb. 2015, in their entirety, and in particular for the Examples therein, and for the associated Figures and Legends.

### Example 1F

[0365] Expression of PVRIG on lymphocyte populations from Healthy PBMCs Urachal cancer, colorectal cancer, ovarian cancer ascites and lung cancer: Results: The expression of PVRIG on CD4+ and CD8+ T cells, NK cells and on CD4+ and CD8+ NKT cells was analyzed in healthy donors' PBMCs and tonsils and in TILs from urachal cancer, colorectal cancer, ovarian cancer ascites, lung cancer and melanoma.

[0366] In healthy donors' PBMCs (n=5) and in ovarian cancer ascites TILs (n=1) high levels of PVRIG expression was detected on NK cells (data not shown) and CD8+NKT cells (data not shown) and to a lower extent also on CD8+ T cells (data not shown) and CD4+NKT (data not shown). CD4+ T cells also stained positively for PVRIG in some of the PBMCs, however the level of expression was quite low (data not shown).

[0367] In addition, PVRIG expression was detected on CD4+ T cells from two out of 6 colorectal cancer TILs tested, and in lung cancer TILs (n=3) (data not shown) and on NK cells from urachal cancer TILs (n=1).

[0368] No PVRIG expression was detected in melanoma TILs due to absence of TILs in the tested sample.

[0369] Specifically incorporated by reference herein is U.S. Ser. No. 62/141,168, filed 31 Mar. 2015, and U.S. Ser. No. 62/118,235, filed 19 Feb. 2015, in their entirety, and in particular for the Examples therein, and for the associated Figures and Legends.

### Example 1G

[0370] Additional evaluations were done to identify addition tissues that over express PVRIG in human and mouse cell lines.

[0371] Reagents: Human PVRIG TaqMan probes (Life technologies) Hs04189293_g1, Cat. #4331182, TaqMan probe for Housekeeping gene (HSKG) (Life technologies) human RPL19 Mm 01577060_gH, human HPRT1 Hs02800695_m1, human SDHA Hs00417200_m1, human PBGD Hs00609296_g1, and human TATA Box Hs00375874_g1. Mouse PVRIG TaqMan probes (Life technologies) CC70L8H, CC6RN19 Custom TaqMan probes. TaqMan probes for Housekeeping gene (HSKG) (Life technologies) mouse RPL19: Mm02601633_g1. ABI TaqMan Fast Advanced Master mix, part no. 4444557, Applied Biosystem. Commercial Human and Mouse cancer cell lines from American Type Culture Collection (ATCC) and CLS (Cell line service) are detailed in Table 1. RNA extraction from human and mouse cell lines was performed with RNAeasy Mini Kit (Qiagen cat #74014). cDNA was produced using High Capacity cDNA Reverse Transcription Kit (Applied Biosystems cat #4368814. Commercial mouse polyclonal Anti-PVRIG Ab MaxPab (B01), Abnova, Cat #H00079037-B01, diluted 1:200. Mouse IgG1, Life Technologies, Cat #MG100, diluted 1:200. Commercial mouse polyclonal Anti-PVRIG Ab, Sigma, Cat #SAB1407935, 10 μg/ml. Chrom pure Mouse IgG, whole molecule, Jackson, Cat #015-000-003, 10 μg/ml. Goat Anti Mouse-PE, Jackson, Cat #115-116-146, diluted 1:100. Custom polyclonal Rat-Anti mouse PVRIG, Batch #20153456C.1, Aldevron, 10 μg/ml. Custom Rat total IgG, Batch #GV20884.1, Aldevron, 10 μg/ml. Goat Anti Rat-PE, Jackson, cat #112-116-143, diluted 1:100. Anti-human PVRIG-CPA.7.024 mIgG1 conjugated to AF647, 10 μg/ml. Anti-human PVRIG-CPA.7.050 mIgG1 conjugated to AF647, 10 μg/ml. Anti-human PVRIG-CPA.7.005 mIgG1 conjugated to AF647, 10 μg/ml. Anti-human PVRIG-CPA.7.002 mIgG1 conjugated to AF647, 10 μg/ml. Synagis IgG1 conjugated to A647, 10 μg/ml. Anti-human PVRIG-CPA.7.021 mIgG1 conjugated to AF647, 10 μg/ml. Synagis IgG2 conjugated to A647, 10 μg/ml. Rabbit polyclonal anti PVRIG Ab, Sigma, Cat #HPA047497, diluted 1:300. Goat Anti Rabbit-HRP, Jackson, Cat #111-035-003, diluted 1:100. VioBlue, Fixable viability stain 450, BD Bioscience, cat #562247, diluted 1:1000. Human Trustain FcX, Biolegend, Cat #422302. Rat anti mouse CD16/CD32 Fc block, BD, Cat #553142. Ingenio Electroporation solution, Mims, Cat #MIR50114. ON-TARGETplus Human PVRIG siRNA—SMARTpool, Dharmacon, Cat #L-032703-02. ON TARGET plus non targeting siRNA, Dharmacon, Cat #D-001810-01-05. The human cell lines used in the study are shown in FIG. 54.

[0372] Transcript expression. Quantitative RT-PCR (qRT-PCR): RNA (1-5 ug) extraction of human and mouse cell lines (detailed above in Tables 1 and 2) was preformed according to manufactures protocols. cDNA was prepared according to manufactures protocols (1 ug RNA diluted in 20 ul cDNA mix reaction). cDNA, prepared as described above, diluted 1:10 (representing 25 ng RNA per reaction), was used as a template for qRT-PCR reactions, using a gene specific TaqMan probes (as above). Detection was performed using QuantStudio 12 k device. The cycle in which the reactions achieved a threshold level of fluorescence (Ct=Threshold Cycle) was registered and was used to calculate the relative transcript quantity in the RT reactions. The absolute quantity was calculated by using the equation Q=2\hat{ }−Ct. The resulting relative quantities were normalized to a relative quantities of housekeeping gene, mRPL19 or hRPL19.

[0373] Protein expression detection by Western Blot (WB): The expression of human PVRIG in human cell lines was analyzed by WB using whole cell extracts (45 ug for the cancer cell lines, and 30 ug for the over expressing cell line and negative control cell line). Commercial rabbit polyclonal anti-human PVRIG pAb, Sigma, cat #HPA047497, diluted 1:300 in 5% BSA/TBST followed by secondary Ab goat anti-Rabbit—Peroxidase conjugated (Jackson, cat #111-035-003), diluted 1:20,000 in 5% milk TBST.

[0374] Protein expression analysis by Flow Cytometry (FACS): The cell surface expression of PVRIG protein was analyzed by FACS. Human or mouse cell lines were stained with VioBlue reagent diluted 1:1000 in PBS. Cells were incubated 15 min at R.T. and then washed once with PBS. Cell lines for endogenous protein analysis were pre-incubated with the Fc receptor blocking solutions listed above in material section (2.5 μl/reaction of human blocker and 1 μl/reaction of mouse blocker was used according to the manufactures procedures). To detect the human PVRIG protein, cells were stained with a commercial polyclonal anti human PVRIG or by a custom monoclonal anti-human PVRIG mAbs (Inc production, detailed in materials & methods section above) diluted to a concentration of 10 μg/ml or 1:200 (for Sigma Ab and for mAb or for Abnova Ab respectively) or IgG1 Isotype control at the same concentration followed by Goat anti mouse PE conjugated Ab.

[0375] To detect the mouse PVRIG protein, cells were stained with a Custom rat polyclonal anti-mouse PVRIG pAb (Aldevron,) diluted to a concentration of 10 μg/ml or rat IgG whole molecule as isotypes control at the same concentration followed by Donkey anti Rat-PE conjugated Ab diluted 1:100.

[0376] PVRIG knock down: Knock down of endogenous human PVRIG was carried out by transient transfection of siRNA. Transfection of 100 pmol PVRIG siRNA pool or scrambled siRNA performed by electroporation using Amaxa nucleofector device and MIRUS Ingenio electroporation solution, as listed above in materials & methods and according to the manufacture procedure. 48 hours post transfection, cells were collected for further analysis by qRT-PCR and FACS.

[0377] Results: Endogenous expression of the PVRIG transcript in human and mouse cell lines by qRT-PCR

[0378] Human cell lines: In order to verify the presence of the PVRIG transcript in human cell lines (listed in FIG. 54), qRT-PCR was performed using a specific TaqMan probe as describe above in Material & Methods. As shown in FIGS. 56A-56C, human PVRIG transcript is observed using TaqMan probe Hs04189293_g1 with relatively high levels in Jurkat (A, B), HUT78 (A, B) and HL60 (B) cell lines. Lower transcript level is observed in THP1, RPMI8226 (B) cell lines. All other cell lines show very low to no transcript.

[0379] Endogenous expression of the PVRIG transcript in mouse cell lines by qRT-PCR: In order to verify the presence of the PVRIG transcript in mouse cell lines (listed in FIG. 55), qRT-PCR was performed using a specific TaqMan probe as describe above in Material & Methods. As shown in FIGS. 57A and 57B mouse PVRIG transcript is observed using TaqMan probe CC70L8H with relatively high levels in NIH/3T3, Renca, SaI/N and J774A.1 (A), cell lines. Lower transcript level is observed in CT26 (A) and B-104-1-1(B) cell lines. All other cell lines show very low transcript.

[0380] Endogenous expression of the PVRIG proteins in human cell lines by WB: WB analysis for endogenous expression of PVRIG protein was carried out on various human cancer cell lines lysates as detailed in FIG. 54 using commercial anti human PVRIG pAb (Sigma, HPA047497) as described in Materials & Methods above. As a positive control, whole cell extract of stable HEK293 cell pool over-expressing PVRIG was used while cells transfected with an empty vector served as the negative control. As shown in FIG. 58, a protein band corresponding to −35 kD was detected in the positive control HEK293 over expressing cells (lane 2), as well as in the Jurkat cell line (lane 3). No expression of human PVRIG was detected in the empty vector cells (lane 1) which served as a negative control nor in ZR75-1 human cell line (lane 4).

[0381] Endogenous expression of the PVRIG proteins in human and mouse cell lines by FACS:
[0382] Human cell line: To verify the cell-surface endogenous expression of human PVRIG, various human cell lines (detailed in FIG. 54) were tested as described in Material & Methods above. The cell lines were stained with the commercial Ab (Abnova) or with Isotype control followed by a secondary goat anti mouse PE Ab. Analysis was performed by FACS. Binding of Abnova antibody was observed in Jurkat human cancer cell line as compared to isotype control binding. No binding of Abnova Ab was observed in the other tested cell lines: For Capan2 and ZR75-1 as compared to isotype control binding, additional FACS analysis was done using Sigma commercial Ab on a various human cell lines (Jurkat, HUT78, Karpas299 and NK-YTS), binding was observed in Jurkat cells only but no binding was observed to other cell lines (data not shown).

[0383] Further analysis for endogenous confirmation of human PVRIG in Jurkat cell line, was done by testing binding of various monoclonal antibodies of the invention. Jurkat cell line was stained with five anti-human PVRIG custom mAbs (CPA.7.024, CPA.7.050, CPA.7.005, CPA.7.002 and CPA.7.021) conjugated to AF647 or with relative Isotype control Ab conjugated to AF647 Analysis was performed by FACS. The expression of human PVRIG in Jurkat human cell line was observed by CPA.7.021 and CPA.7.050 only, as compared to isotype control expression. No binding for human PVRIG was observed in Jurkat cell line by using the other three mAbs.

[0384] Mouse cell line: to verify the cell-surface endogenous expression of mouse PVRIG, various mouse cell lines: J774A.1, NIH/3T3, SaI/N and Renca (detailed in FIG. 55), were tested as described in Material & Methods above. The cell lines were stained with the custom polyclonal rat anti mouse PVRIG Ab (Aldevron), or with Isotype control (Aldevron) followed by a secondary goat anti rat PE Ab. Analysis was performed by FACS. No binding for mouse PVRIG protein was observed in either of the tested mouse cell lines by Aldevron polyclonal Ab (data not shown).

[0385] Knock down of human PVRIG in human cell lines: In order to further confirm endogenous expression of PVRIG protein in Jurkat cell line, human PVRIG siRNA pool was used for knock down as described in Material & Methods. 48 hours post siRNA transfection, cells were harvested for further analysis by qRT-PCR and by FACS.

[0386] Knock down of human PVRIG in human cell lines tested by qPCR: As shown in FIG. 59, human PVRIG transcript level in Jurkat cells transfected with human PVRIG siRNA pool is significantly reduced (right histogram bar) as compared to cells transfected with scrambled siRNA (left histogram bar) analyzed by qRT-PCR as described in Material & Methods.

[0387] Knock down of human PVRIG in human cell lines tested by FACS: Further analysis of human PVRIG membrane expression in the same siRNA transfected cells was performed by FACS. As shown in FIG. 60 membrane expressions of human PVRIG protein is reduced in cells transfected with PVRIG siRNA (green for CPA.7.021 mAb or red for Sigma Ab) as compared to cells transfected with scrambled siRNA (orange). The fold change (anti PVRIG vs, Isotype control) in Jurkat cell line is decreased from 8 fold to 3.3 fold by using Sigma Ab, or from 15.3 fold to 2.8 fold by using CPA.7.021 mAb.

[0388] This report includes preliminary data on PVRIG endogenous expression in cell lines both at the RNA level and the protein level in human and mouse cell lines.

[0389] Various human cancer cell lines were tested by qRT-PCR, WB and FACS for endogenous expression of PVRIG.

[0390] Cell surface expression of human PVRIG was observed in Jurkat cell line by using the commercial polyclonal Abs (Sigma and Abnova) and the mouse monoclonal Abs (Inc), as shown in FIGS. 4A and 4B respectively. These observations are in correlation to RNA transcript levels as shown in FIGS. 1A & 1B, and to WB results as shown in FIG. 3.

[0391] Additional confirmation of endogenous human PVRIG in Jurkat cell lines was done by knock down experiment confirming clear reduction in the RNA transcript following PVRIG siRNA transfection, as shown in FIG. 5, and also reduction was observed in the protein cell surface expression in Jurkat cell lines as shown in FIG. 6 by commercial Ab and by monoclonal Ab.

[0392] Various mouse cell lines were tested by qRT-PCR and FACS for endogenous expression of PVRIG. In the transcript level, presence of PVRIG was observed in J774A.1, NIH/3T3, SaI/N and Renca cell lines as shown in FIGS. 2A & B. Although no membrane expression of mouse PVRIG was observed in these tested cell lines detected by polyclonal Ab (Aldevron) (data not shown). FIG. 61 and FIG. 62 indicate the summary of the findings described in this report, highlighting the cell lines showing correlation between qPCR and FACS, confirmed by knock down.

[0393] Specifically incorporated by reference herein is U.S. Ser. No. 62/141,168, filed 31 Mar. 2015, and U.S. Ser. No. 62/118,235, filed 19 Feb. 2015, in their entirety, and in particular for the Examples therein, and for the associated Figures and Legends.

### Example 1H

[0394] The aim of this experiments is to evaluate the expression of PVRIG protein on resting or activated human (Tumor infiltrating lymphocytes) TILs isolated from human melanoma samples and propagated in the presence of melanoma specific antigens and IL2. Human mAb were produced directed against the extracellular domain (ECD) of human PVRIG. These Abs were directly labeled with Alexa flour 647 in order to examine the expression of PVRIG on cells by FACS analysis.

### Materials and Methods

[0395] TILs: In this experiments series three different Tumor-infiltrating lymphocyte (TIL) from resected metastases of three melanoma patients were used: 1) TIL-412-HLA-A2-Mart1 specific; 2) TIL-F4-HLA-A2-gp100 specific, and 3) TIL-209-HLA-A2-gp100 specific. Human TILs (>90% CD8+), were thawed 24 h prior to beginning of experiment. Cells were thawed in 12 ml of TIL medium (IMDM+10% human serum+1% Glutamax+1% Na-Pyruvate+1% non-essential amino acids+1% Pen-Strep) supplemented with 300 U/ml of rhIL2 (Biolegend 509129). Cells were left to recover from freezing for 24 hours.

[0396] Assay conditions: After recovery, TILs were tested in four different conditions: 1) Resting—with 300 U/ml of IL2 (Biolegend cat-589106), 2) With polyclonal activation of T cells, using 1 μg/ml of plate bound anti CD3 antibody (eBioscience clone OKT3, cat-16-0037-85)+2 μg/ml of anti CD28 ab (eBioscience clone CD28.2 cat-16-0289-85)+300 U/ml of IL2. 3) Co-cultured (1:1) with Me1888 (LIMS ID: CL-216) melanoma cells (HLA-A2 negative) and 4) Co-cultured (1:1) with Me1624 (LIMS ID CL-218) melanoma cells (HLA-A2+Mart1/gp100 positive).

[0397] After 12 hours of resting/activation/co-culture, cells were tested by FACS for PVRIG expression as well as the expression of other members of PVRIG pathway and other surface markers.

[0398] Staining cells: Cells were harvested after 12 hours and washed twice with PBS. Cells were stained in room temp for 20 minutes with PBS supplemented with 1/1000 of fixable viability stain efluor 450 (BD horizon cat-562247). After staining, cells were washed twice with PBS and stained for 15 minutes on ice with FACS buffer (PBS+0.5% BSA+2 mM EDTA+0.05% Azide) supplemented with 1/25 of human Truestain FC-Block (Biolegend, 422302). After FC-blocking, cells were stained on ice for 30 minutes with the Abs and concentrations that are listed in table 1.

| | | Conjugated | | Catalog | concentration | Staining |
|---|---|---|---|---|---|---|
| Antibodies | Isotype | to | Manufacturer | number | (ug/ul) | concentration |
| Anti-human | Human | AF-647 | Compugen—iNC | CPA.7.021 | 0.2 | 5 μg/ml |
| PVRIG— | IgG2 | | | | | |
| CPA.7.021 | | | | | | |
| Human IgG2 | Human | AF-647 | Compugen—iNC | | 0.2 | 5 μg/ml |
| isotype control | IgG2 | | | | | |
| CD96 | mIgG1 | APC | Biolegend | 338410 | 0.2 | 4 μg/ml |
| PVR | mIgG1 | APC | Biolegend | 337618 | 0.05 | 1 μg/ml |
| PVRL2 | mlgG1 | APC | Biolegend | 337412 | 0.1 | 2 μg/ml |
| TIGIT | mIgG1 | APC | eBioscience | 17-9500-42 | 0.025 | 0.5 μg/ml |
| DNAM1 | mIgG1 | APC | Biolegend | 338312 | 0.1 | 2 μg/ml |
| PD1 | mIgG1 | AF647 | Biolegend | 329910 | 0.1 | 2 μg/ml |
| CD8 | mIgG1 | FITC | Biolegend | 300906 | 0.15 | 3 μg/ml |

[0399] After staining, cells were washed once and re-suspended in FACS buffer for analysis. Compensation calibration was done using compensation beads (BD, 552843). One drop of beads were stained for 30 minutes with above antibodies. Beads staining was done with same concentrations as cell staining. After beads staining, compensation was performed on MacsQuant FACS machine according to standard procedure. All samples were acquired on a MACSQuant analyzer (Miltenyi) and data was analyzed using Tree Star FlowJo software (v10.0.8).

[0400] PVRIG is expressed on human resting TILs: Resting TILs, cultured for 12 hours with 300 U/ml of IL2 only, were stained for PVRIG expression and analyzed by FACS. Gating strategy for TILs: Lymphocytes were gated first according to size and granularity in FCS:SSC graph, than single cells were gated according to FSC-H and FSC-A, than live cells were gated according to viability Dye staining in Vioblue:FSC graph, than CD8⁺ cells were gated according to CD8 staining in CD8:FSC graph. Expression levels of PVRIG was than plotted according to PVRIG staining in histograms.

[0401] PVRIG expression on human TILs is downregulated upon activation with anti CD3+anti CD28 abs: Human TILs, cultured for 12 hours with anti CD3+anti CD28 abs+IL2 were stained for PVRIG expression and analyzed by FACS. PVRIG expression on surface of all three TILs examined is downregulated upon activation, comparing to resting TILs (data not shown).

[0402] PVRIG expression on human TILs is slightly downregulated upon co-culture with Me1888: Human TILs, co-cultured for 12 hours with Me1888 cells were stained for PVRIG expression and analyzed by FACS. PVRIG expression on surface of all three TILs examined is slightly downregulated upon co-culture with Me1888 comparing to resting TILs.

[0403] PVRIG expression on human TILs is downregulated upon co-culture with Me1624: Human TILs, co-cultured for 12 hours with Me1624 cells were stained for PVRIG expression and analyzed by FACS.PVRIG expression on surface of all three TILs examined is slightly downregulated upon co-culture with Me1624 comparing to resting TILs.

[0404] Expression of other pathway members on resting TILs: Human TILs, co-cultured for 12 hours with IL2 only were stained for the expression of CD96, PVR, PVRL2, TIGIT and DNAM1 and analyzed by FACS. CD96, TIGIT and DNAM1 is expressed on all three examined TILs. PVR is expressed on the surface of all three TILs as well but to relatively low levels. PVRL2 is not detected on any of the TILs.

[0405] Expression of other pathway members on TILs activated with anti CD3 and anti CD28 abs: Human TILs, cultured for 12 hours with anti CD3 and anti CD28 abs were stained for the expression of CD96, PVR, PVRL2, TIGIT and DNAM1 and analyzed by FACS. Upon activation with anti CD3+anti CD28 abs, CD96 is downregulated, PVR is slightly upregulated, TIGIT is slightly upregulated and DNAM1 is upregulated as well.

[0406] Expression of other pathway members on TILs Co-cultured with Me1888: Human TILs, co-cultured for 12 hours with Me1888 cells were stained for the expression of CD96, PVR, PVRL2, TIGIT and DNAM1 and analyzed by FACS. Upon co-culture with Me1888, CD96 is downregulated, PVR is highly upregulated, TIGIT and DNAM1 is downregulated, PVRL2 is slightly induced as well.

[0407] Expression of other pathway members on TILs Co-cultured with Me1624: Human TILs, co-cultured for 12 hours with Me1624 cells were stained for the expression of CD96, PVR, PVRL2, TIGIT and DNAM1 and analyzed by FACS. Gating strategy was done according to FIG. 1. Upon co-culture with Me1624, CD96 is downregulated, PVR is highly upregulated, TIGIT is stable or slightly upregulated, DNAM1 is downregulated and PVRL2 is slightly induced.

[0408] Expression of PD1 on TILs: Human TILs, cultured for 12 hours with IL2 only or activated with anti CD3+anti CD28 abs or co-cultured with Me1888 or with Me1624 cells were stained for the expression of PD1 and analyzed by FACS. As can be seen in FIG. 16 and FIGS. 17, PD1 is expressed on resting TIL412 only. No change in PD1 expression is noticed upon co-culture with Me1888, But, PD1 is upregulated in all three TILs upon co-culture with Me1624 or upon activation with anti CD3+anti CD28 abs.

[0409] Summary and conclusions: For all TILs that were tested:
[0410] Anti PVRIG—CPA.7.021 ab stains TILs (up to 2.6 fold)
[0411] PVRIG expression is downregulated upon activation of 12 hours with anti CD3+anti CD28 abs or upon co-culture with Me1624 (almost to background level).
[0412] Resting TILs express CD96, TIGIT and DNAM1 (up to 35, 12 and 79 fold respectively)
[0413] CD96 expression is downregulated upon activation (from up to 35 to ˜11 fold) or co-culture with irrelevant (HLA-A2-) melanoma
[0414] DNAM1 expression is upregulated upon activation with aCD3/CD28 abs (from up to 79 to 102 fold) but strongly downregulated upon co-culture of TILs with Mels (down to 8 fold).
[0415] TIGIT expression is slightly downregulated upon co-culture of TILs with mel888 cell line, and was stable with a slight upregulation upon co-culture with Me1624 or activation with anti CD3+anti CD28 abs.
[0416] PD1 expression is upregulated upon activation (from 0 up to 18 fold)
[0417] High levels of PVR were detected following TILs co-culture with melanomas (from <2 up to 18 fold).

[0418] Resting TIL-412 show positive staining for PD1. TIL-F4 is also slightly positive for PD1 whereas TIL-209 is negative. Summary of changes in expression levels of all parameters tested, in the different conditions can be seen in Table 2.

TABLE 2

| | +IL2 | +αCD3+αCD28+IL2 | +Mel888 | +Mel624 |
|---|---|---|---|---|
| PVRIG | 1.4-2.6 | 0-12 | 1.3-1.7 | 0-1.2 |
| CD96 | 23-35 | 12.7-16 | 11.7-17.6 | 11.1-16.6 |
| TIGIT | 5.7-12.6 | 7.8-12.5 | 4-7.3 | 6.1-12.5 |
| DNAM1 | 43-79 | 56-100 | 14-20 | 17-25 |
| PVR | 1.6-1.8 | 2.6-3.2 | 13.6-18 | 11-17 |
| PVRL2 | 0 | 0 | 1.4-2.3 | 1.2-1.8 |
| PD1 | 0-4.5 | 2.3-18.4 | 0-4.6 | 2-9.3 |

[0419] Specifically incorporated by reference herein is U.S. Ser. No. 62/141,168, filed 31 Mar. 2015, and U.S. Ser. No. 62/118,235, filed 19 Feb. 2015, in their entirety, and in particular for the Examples therein, and for the associated Figures and Legends.

### Example 1I: Expression of PVRIG on Resting and Activated Human T Cells and TILs

[0420] The aim of this example was to evaluate the expression of PVRIG protein on resting and activated human isolated primary CD4+ and CD8+ T cells, as well as TILs (Tumor Infiltrating Lymphocytes) isolated from human melanoma samples and propagated in the presence of melanoma specific antigens and IL2. Human mAbs were produced against the extracellular domain (ECD) of human PVRIG. These Abs were directly labeled with Alexa flour 647 in order to examine the expression of PVRIG on cells by FACS analysis.

### Materials and Methods

[0421] TILs: In this series of experiments, two different TILs, from resected metastases of three melanoma patients, were used:

[0422] TIL-Mart1-HLA-A2-Mart1 specific

[0423] TIL-209-HLA-A2-gp100 specific

[0424] Human TILs (>95% CD8+), were thawed 24 h prior to beginning of experiment. Cells were thawed in 12 ml of TIL medium (IMDM+10% human serum+1% Glutamax+1% Na-Pyruvate+1% non-essential amino acids+1% Pen-Strep) supplemented with 300 U/ml of rhIL2 (Biolegend 509129). Cells were left to recover for 24 hours.

[0425] Primary T cell: In this series of experiments two different donors were used:

[0426] CD4+ and CD8+ from donor #147

[0427] CD4+ and CD8+ from donor #186

[0428] Human primary cells (>95% purity), were thawed 24 h prior to beginning of experiment. Cells were thawed in RPMI complete medium (RPMI+10% FBS+1% Glutamax+1% Na-Pyruvate+1% Pen-Strep) supplemented with 300 U/ml of rhIL2 (Biolegend 509129). Cells were left to recover for 24 hours.

[0429] Assay conditions: After recovery, cells were activated using a polyclonal activation of T cells, with 1 μg/ml of plate bound anti CD3 antibody (BD-pharmingen clone Ucht-1, cat-555329), 2 μg/ml of anti CD28 ab (eBioscience clone CD28.2 cat-16-0289-85) and 300 U/ml of IL2.

[0430] Activation was carried out for 24 h, 48 h, 72 h and 144 h.

[0431] Staining cells: Cells were harvested and washed with PBS. Cells were stained at room temprature for 10 minutes with PBS supplemented with 1/1000 of fixable viability stain efluor 450 (BD horizon cat-562247). After staining, cells were washed twice with PBS and stained with the Abs at the concentrations listed in FIG. 65 for 30 minutes on ice in FACS buffer (PBS+0.5% BSA+2 mM EDTA+0.05% Azide) and concentrations that are listed in FIG. 65. After staining, cells were washed once and re-suspended in FACS buffer for analysis.

[0432] Results: Human T cells from two different donors and TILs were left untreated (resting) or polyclonal stimulated for various timepoints as described in Materials and Methods. Cell activation state was evaluated by detection of surface expression of CD137 and PD-1 at each time point compared to isotype control (FMO), as shown for activated CD8+, CD4+ T cells and TILs (FIGS. 70A, B & C respectively). As expected, PD-1 and CD137 expression was detected and elevated upon activation (FIGS. 70A, B & C).

[0433] PVRIG expression was observed on both resting CD4+ and CD8+ T cells, with higher expression on CD8+ cells (6-8 fold) as compared to CD4+ cells (3 folds), and diminished upon activation (FIGS. 71A, B & C). On days 3-6 of activation, PVRIG expression was increased on CD8+(4-5 fold) and CD4+(2-3 fold) T cells, as can be seen in FIGS. 71A, B & C.

[0434] In addition, PVRIG expression was also observed on Mart1 and 209 resting TILs, and expression was decreased apon activation (FIGS. 72A, B & C). On day 3-6 of activation PVRIG expression was increased, as can be seen in FIG. 72, compared to day 1-2 of activation.

### Example 2: Generation and Characterization of PVRIG-Expressing Stable Transfectant Cell Pools

[0435] Recombinant stable pools of cell lines overexpressing PVRIG human and mouse proteins were generated, for use in determining the effects of PVRIG on immunity, for PVRIG characterization and for identifying immunoregulatory PVRIG based therapeutic agents.

### Materials & Methods:

[0436] Reagents: DNA constructs:

[0437] Human PVRIG flag pUC57

[0438] Human PVRIG flag pCDNA3.1

[0439] Human PVRIG flag pMSCV

[0440] Recombinant Cells:

[0441] HEK293 pCDNA3.1 Human PVRIG flag

[0442] HEK293 pMSCV Human PVRIG flag

[0443] Commercial Antibodies:

[0444] Anti PVRIG, Sigma cat. HPA047497—Rabbit polyclonal

[0445] Anti-PVRIG, Abnova cat. H00079037-B01—Mouse polyclonal

[0446] Full length validation of mouse PVRIG was done using PCR reactions and sequencing of the PCR products.

[0447] Three couples of primers were used (Table 3).

TABLE 3
Sequence of primers used for mouse full length validation

| Primer name | Sequence |
|---|---|
| 200-554_mPVRIG_F | CCACCAACCTCTCGTCTTTC (SEQ ID NO: 1547) |
| 200-553_mPVRIG_R | TCATGCCAGAGCATACAG (SEQ ID NO: 1548) |
| 200-571_mPVRIG_F | CAGTGCCTCTAACTGCTGAC (SEQ ID NO: 1549) |
| 200-572_mPVRIG_R | TCACTGTTACCAGGGAGATGAG (SEQ ID NO: |
| | 1550) |
| 200-549_mPVRIG_F | CACAGGCTGCCCATGCAAC (SEQ ID NO: 1551) |
| 200-551_mPVRIG_R | TGCCTGGGTGCTAGTGAGAG (SEQ ID NO: |
| | 1552) |
| 200-554_mPVRIG_F | CCACCAACCTCTCGTCTTTC (SEQ ID NO: 1553) |
| 200-546_mPVRIG_R | GACCCTGTTACCTGTCATTG (SEQ ID NO: 1554) |

[0448] As a templet for the PCR reaction, cDNA of NIH 3T3 cell line or a mix of three commercial cDNA panels were used:
[0449] 1. cDNA panel I, Mouse, Biochain, Cat no. C8334501 (Heart, Brain, Kidney, Liver).
[0450] 2. cDNA panel II, Mouse, Biochain, Cat no. C8334502 (Lung, Pancreas, Spleen, Skeletal Muscle).
[0451] 3. cDNA, Clontech, Cat no. 637301, (Brain, Heart, day 7 Embrio, Testis, Spleen).

[0452] Expression Constructs

[0453] Full length cloning of human and mouse PVRIG-flag was performed by gene synthesis (GenScript) using codon optimized sequence in pUC57 vector for human transcript and non optimized for mouse transcript and subcloned into a mammalian expression vector, pcDNA3.1 or to pMSCV, to create the expression plasmid.

[0454] Human PVRIG sequence that was subcloned into pcDNA3.1 initiate from the second methionine of human PVRIG protein, whereas the human PVRIG sequence that was subcloned into pMSCV initiate from the first methionine of human PVRIG protein.
[0455] Construct encoding the Human PVRIG-flag.

[0456] Full length human PVRIG gene, synthesis by GenScript was subcloned into using pcDNA3.1 using Baml and Nhel restriction enzymes.

[0457] Constructs encoding the mouse PVRIG proteins:

[0458] Four contracts encoding the mouse sequence were synthesize by GenScript as following:
[0459] 1. First Methionine no tag
[0460] 2. First Methionine with Flag
[0461] 3. Second Methionine no tag
[0462] 4. Second Methionine with Flag

[0463] The synthesize gene were subcloned into pCDNA3.1

[0464] Generation of Stable Transfectants Over Expressing PVRIG Proteins

[0465] The resulting expression construct was verified by sequence and subsequently used for transfections and stable pool generation as described below. The protein sequences encoded by the expression constructs are as set forth in FIGS. 103A-103BX.

[0466] Generation of Stable Transfectant Pools Expressing Human PVRIG-Flag Protein

[0467] HEK293 (ATCC, catalog number: CRL-1573) cells were transfected with pCDNA3.1+human PVRIG-flag plasmid or with empty vector (pCDNA3.1+ as negative control), using FUGENE 6 Reagent (Roch, catalog number 11-988-387). Geneticin, G418 (Gibco, catalog number: 11811-031) resistant colonies were selected for stable pool generation.

[0468] GP2-293 packaging cell line (Clontech cat #631458) was transfected with pMSCV-human PVRIG or with pMSCV empty vector using Lipofectamine 2000 transfection reagent (Invitrogen, catalog number 11668019). 48 hours post transfection supernatants containing virions were collected, and directly used for infection of the human cell line as follows:

[0469] HEK-293 (ATCC, CRL-CRL-1573) cells was infected with virions expressing human PVRIG or with pMSCV empty vector virions as negative control, Puromycin (Invivogen, catalog number: 58-58-2) resistant colonies were selected for stable pool generation.

[0470] Expression Validation

[0471] Expression Validation by Western Blot

[0472] Whole cell extracts of cell pool (30 ug of total protein) were analyzed by western blot. As negative control, whole cell extracts of stable cell pools transfected with the empty vector were used. For the human PVRIG-flag detection, anti-flag and anti PVRIG antibodies were used as follow:
[0473] Mouse anti Flag M2-Peroxidase, Sigma, cat. A8592 diluted 1:1000 in TTB S/5% BSA;
[0474] Anti PVRIG, Sigma cat. HPA047497— Rabbit polyclonal, diluted 1:200 in TTB S/5% BSA. Followed by Goat Anti Rabbit-HRP, Jackson, Cat: 111-035-003 diluted 1:20,000 in 5% milk/TTBS solution.

[0475] Expression validation by Flow Cytometry (FACS)

[0476] In order to validate the cell surface expression of the human PVRIG protein in the recombinant stable pools, 1×10⁵ cells were stained with Fixable viability stain 450 (BD, 562247) diluted 1:1000 in PBS, for 10 min at R.T. Mouse polyclonal anti PVRIG, (Abnova, Cat.H00079037-B01) diluted 1:200 or with mouse IgG1 isotype control (Life Technologies), were then added to cells followed by staining with Goat Anti Mouse-PE (Jackson, cat. 115-116-146).

[0477] Results Expression Validation of HEK293 Stable Pool Cells Over Expressing the Human PVRIG-Flag Protein

[0478] To verify expression of the PVRIG protein in the stably transfected HEK293 cells pools, whole cell extracts were analyzed by western blot using anti-flag antibody or anti PVRIG antibodies (Abnova), as described in Material and Methods. The results, shown in FIG. 24, demonstrate a band corresponding to the expected protein size of ˜33 kDa in the extracts of HEK293 cell pools expressing human PVRIG, but not in the cells transfected with the empty vector.

[0479] In order to verify cell surface expression of the PVRIG protein, HEK293 stably transfected cells over-expressing the PVRIG-flag pCDNA3.1 vector were analyzed by FACS using mouse anti-PVRIG pAb (Abnova) as described in Material and Methods. The results presented in FIG. 25 show that the binding of mouse anti-PVRIG pAb to cells stably expressing the human PVRIG-flag (gray) is higher than that observed with cells transfected with the empty vector (light gray).

### Example 3: PVRIG-ECD IG Fusion Protein Production

[0480] PVRIG mECD-mIg fusion protein (see FIGS. 103A-103BX), composed of the ECD of mouse PVRIG fused to the Fc of mouse IgG2a, was produced at ProBioGen (Germany) in CHO-DG44 cells by culturing stable cell pools for 12 days, followed by Protein A purification of cell harvest and preparative SEC purification for aggregate removal. The final product was formulated in 5 mM Na citrate, 5 mM Na/K phosphate, 140 mM NaCl, 0.01% Tween pH5.5.

[0481] Expression vector used was ProBioGen's PBG-GPEX6. PVRIG gene is driven by CMV/EF1 hybrid promoter followed by polyadenylation signal pA-1. The vector contains puromycin N-acetyl-transferase gene that allows selection of transfected cells using puromycin, as well as dehydrofolate reductase gene that allows selection of transfected cells using methotrexate (MTX).

[0482] PVRIG hECD-hIg fusion protein (see FIGS. 103A-103BX), composed of the ECD of human PVRIG fused to the Fc of human IgG1 bearing C220, C226 and C229 to S mutations at the hinge, was produced at GenScript (China) by transient transfection in CHO-3E7 cells which were cultured for 6 days, followed by protein A purification of cell harvest. The final product was formulated in PBS pH 7.2.

[0483] Expression vector used was Mammalian Expression Vector pTT5, in which PVRIG gene is driven by CMV promoter.

### Example 4: Expression of PVRIG on Human PBLS and Binding of PVRIG-FC to Melanoma Cell Lines

[0484] PVRIG is a novel immune checkpoint protein, which without wishing to be limited by a single theory functions as a CD28 like receptor on T cells. In this study, the expression of PVRIG on human peripheral blood lymphocytes and the binding of PVRIG-ECD-Ig (composed of the extra-cellular domain of human PVRIG fused to human IgG1) to melanoma cell lines was evaluated.

### Materials and Methods

[0485] Three human melanoma cell lines which present the MART-1 antigen in HLA-A2 context (SK-MEL-23, Mel-624 and Me1-624.38) were used as targets for CTLs. Mel-888 which does not express HLA-A2, served as a negative control.

[0486] Buffy coats from human healthy donors were obtained from Tel Hashomer Blood Bank. Peripheral blood mononuclear cells were stimulated with PHA and cultured for 3 days, and subsequently transduced with MSCV-based retroviral vector (pMSGV1). Following transduction, cells were further grown in lymphocyte medium (Bio target medium, fetal bovine serum (10%), L Glutamine Penicillin/Streptomicyn (100 units/nil), IL-2 300 IU) for additional 5 days.

[0487] To evaluate PVRIG expression on PBLs, cells were stained with a specific antibody for PVRIG (mouse poly clonal) at 5 μg/ml for 30 min at 4 degrees. Following washing, cells were stained with FITC conjugated Goat anti mouse mAb (1:250) (Invitrogen, Cat #A10667) in FACS buffer in the dark for 30 minutes at 4 degrees. Following two washes in FACS buffer, samples were read on a BD Bioscience FACS Calibur with a Cytek HTS.

[0488] To evaluate binding of PVRIG-Ig to the melanoma cell lines, SK-MEL-23, Mel-624, Mel-624.38 and mel-888, cells were co-cultured with F4 transduced or un-transduced (designated w/o) PBLs and subsequently stained with 20 μg/ml of the fusion protein PVRIG-Ig HH batch #125. Following two washes in FACS buffer, samples were stained with a secondary goat anti-human PE (Jackson, cat #109-116-098).

### Results

[0489] To evaluate the endogenous expression of PVRIG on primary human leukocytes, PBLs were stimulated with PHA and subsequently transduced with an empty vector and stained with an anti-PVRIG specific antibody. As shown in FIG. 11, in two different donors staining with anti-PVRIG is observed relative to an isotype matched control.

[0490] To evaluate the endogenous expression of PVRIG on melanoma cell lines and to determine whether the endogenous expression is affected by co-culture with antigen specific T cells, 4 different melanoma cell lines (SK-MEL-23, Mel-624, Mel-624.38 and mel-888) cu-cultured with PBLs either expressing or not expressing the F4 (gp100 specific TCR). Cells were subsequently stained with the fusion protein composed of the extra-cellular domain of human PVRIG fused the Fc portion of human IgG1. As shown in FIG. 12, all 4 tested human melanoma cell lines exhibit binding to PVRIG-Ig. Binding intensity is not affected by T cell dependent activation following co-culture with melanoma reactive engineered T cells.

[0491] Summary: The results presented herein suggest that PVRIG is expressed on PHA activated human primary peripheral blood leukocytes (PBLs). In addition, 4 melanoma cell lines that were tested in this study bind to the fusion protein composed of the extra-cellular domain of human PVRIG fused the Fc portion of human IgG1 suggesting that these cell lines express the counterpart for PVRIG.

### Example 5: Receptor-Ligand Identification and Validation

[0492] A first validation study was performed using a cell microarray technology was used to screen for interactions of PVRIG to 3559 full-length human plasma membrane proteins, which were individually expressed in human HEK293 cells.

[0493] Human HEK293 cells were grown over slides spotted with expression vectors encoding 3559 full-length human membrane proteins. An expression vector (pIRES-hEGFR-IRES-ZsGreen1) was spotted in quadruplicate on every slide, and was used to ensure that a minimal threshold of transfection efficiency had been achieved or exceeded on every slide. Human HEK293 cells were used for reverse transfection/expression. A fusion protein composed of the ECD of PVRIG fused to a human IgG1 was added at 20 μg/ml to each slide following cell fixation. Detection of binding was performed by using an appropriate fluorescent secondary antibody. Two replicate slide-sets were screened. Fluorescent images were analyzed and quantitated (for transfection efficiency) using ImageQuant software (GE).

[0494] A protein ‘hit’ was defined as a duplicate spot showing a raised signal compared to background levels. This was achieved by visual inspection using the images gridded on the ImageQuant software. Hits were classified as ‘strong, medium, weak or very weak’, depending on the intensity of the duplicate spots. To confirm the hits, all vectors encoding the hits identified in the primary screen were arrayed on new slides. Confirmation/Specificity screen and analyses was carried out as for primary screening (n=2 replicate slides per sample), except that identical slides were also probed with appropriate negative controls. Additionally, all the vectors encoding the hits were sequenced. Vectors encoding every primary hit was sequenced confirming its identity.

[0495] Background screen showed negligible binding to untransfected HEK293 cells at 2, 5 and 20 μg/ml (FIG. 13). Based upon the background data, 20 μg/ml was chosen for full profiling. Primary screen resulted in multiple duplicate hits (clones), with the majority being weak or very weak intensity. All primary hits identified, and a control EGFR-ZsGreen1 vector, were spotted and re-expressed in duplicate and probed with PVRIG at 20 μg/ml for the Confirmation/Specificity screen.

[0496] A single specific hit, PVRL2, with strong intensity, was identified (FIG. 14). Another weak hit, MAG, was later shown to bind also other fusion proteins tested (data not shown), thus suggesting that it is not specific. These results are consistent with the recently published abstract https://www.yumpu.com/en/document/view/7263720/sunday-december-4-late-abstracts-1-molecular-biology-of-the-/133 by G. Quinones in New Technologies & Frontlers. PVRL2 is known to play a role as a ligand for TIGIT and DNAM1, which are both modulators of T cell and NK cell activation. TIGIT has been recently reported to be a key player in the inhibition of the immune response directed against tumor cells (Noa Stanietsky, journal of immunology, vol. 106 no. 42, 17858-17863; Robert J Johnston, Cancer cell, Volume 26, Issue 6, p923-937, 8 Dec. 2014). Results presented in Example 5, showing interaction of PVRIG with the same counterpart as TIGIT, suggests an involvement of PVRIG in an important regulatory pathway that regulates cancer immune surveillance and thus positions PVRIG as a potential target for cancer treatment.

### Additional Validation Study 2

### Materials and Methods

### Materials

[0497] Fc fusion proteins, His-tagged proteins and control Ig: The Fc fusion protein PVRIG-Fc M:M was used for binding studies. Mouse IgG2a was used as isotype control. Other commercial mouse proteins used in the study were PVRL2-his (R&D, 3869-N2), and PVRL2-his (Sino Biological, 50318-M08H).

[0498] Cells: HEK293 over-expressing (OX) mouse PVRIG and PVRIG-FLAG were generated (RC-287 and RC-286, respectively) and binding of PVRL2 to these cells was compared to HEK293 cells expressing empty vector (EV) (RC-83). HEK293 OX mouse PVRL2 splice variants 1 and 2 (sv1 and sv2) were generated (RC-334 and RC-335, respectively) and binding of PVRIG to these cells was compared to HEK293 cells expressing EV. B16-F10 cells (CL-161, mouse skin melanoma cells endogenously expressing mPVRL2) were also used to study the interaction between PVRIG and PVRL2.

[0499] Antibodies: Anti-mouse PVRL2-PE Ab (R&D, FAB3869P, 25 μg/ml, 1:100) was used for detection of PVRL2. Rat IgG2A-PE (R&D, IC006P, 25 μg/ml, 1:100) was used as isotype control. Anti-mouse-PE (Jackson Immunoresearch, 115-115-206, 0.5 mg/ml, 1:200) and anti-his Ab (Abcam, ab72467, 0.1 mg/ml, 1:300) were used to detect binding of recombinant proteins. Anti-DYKDDDDK Tag (“DYKDDDDK” disclosed as SEQ ID NO:1555) (anti-FLAG) Ab (BioLegend, 637302, 0.5 mg/ml, 1:300) was used for detection of PVRIG expression on HEK293 OX mouse PVRIG-FLAG. For PVRIG labeling, Alexa Fluor® 647 Antibody Labeling Kit (Molecular Probes, A-20186) was used according to manufacturer's protocol. For biotinylation of PVRIG, DSB-X™ Biotin Protein Labeling Kit (Molecular Probes, D-20655) was used according to manufacturer's protocol. Biotinylated PVRIG was detected by streptavidin-PE (SA-PE) (Jackson Immunoresearch, 016-110-084, 0.5 mg/ml, 1:300).

### Methods

[0500] FACS analysis of mouse PVRIG-Fc binding to stable HEK293 cells over-expressing (OX) mouse PVRL2 or to B16-F10 cells: HEK293 cells OX PVRL2 (sv1 or sv2) or B16-F10 cells were suspended to 10⁶ cells/ml in PBS. For each 1 ml of cells, 1 μl of viability stain stock solution (BD Horizon Fixable Viability Stain 450, cat. 562247, BD Bioscience) was added. Cells were incubated for 10 min protected from light at room temperature. The cells were then washed twice with PBS and suspended to 3×10⁶ cells/ml in the presence of 1:50 human TruStain FcXTM (BioLegend 422302) in FACS buffer (PBS supplemented with 2% FBS and 0.5 mM EDTA) at room temperature for 15 min for blocking of Fcγ-receptors. Without washing, 1×10⁵ cells/well were then plated in 96-well V-shaped plates (Costar #3357). Expression of PVRL2 was examined by anti-PVRL2 antibody (see above). Binding of PVRIG-Fc to cells was examined with various batches (see above), generally at 60 μg/ml or with several concentrations. Cells were incubated with antibodies or PVRIG-Fc for 40 min at room temperature, then washed once. Secondary antibody (anti-mouse-PE) was added for 15 min at room temperature, cells were washed twice and were taken for analysis by MACSQuant® FACS analyzers (Miltenyi Biotec), followed by data analysis using Flow-Jo software.

[0501] FACS analysis of mouse PVRL2-his binding to stable HEK293 cells OX mouse PVRIG: PVRIG levels were examined with anti-FLAG antibody. PVRL2-his binding was monitored by anti-his antibody. FACS analysis was performed as described above.

[0502] Biophysical SPR analysis of mouse PVRIG/PVRL2 interaction by Biacore: The interaction between mouse PVRIG and PVRL2 was analyzed in a Biacore T100 SPR biomolecular interaction analyzer at Bar-Ilan University. Proteins were diluted to 100 nM in acetate buffer pH 4.0, and were covalently coupled to a unique flow cell of a CM5 Series S Biacore chip using standard amine coupling chemistry. Surfaces were activated with EDC-NHS, and later blocked by injection of 1M ethanolamine (pH 8.5). Running buffer was Hepes pH 7.3, 150 mM NaCl, 3 mM EDTA and 0.05% Tween-20 (HBS-EP+). Final immobilization levels were ˜1000RU. Proteins used as analytes were diluted to 2500 nM, 500 nM and 100 nM. In each run one tube contained running buffer only for reference. After each run a regeneration step with 4M MgCl2 for 30 sec at 20 μl/sec was performed.

### Results

[0503] Binding of mouse PVRIG to HEK293 cells OX PVRL2 sv1: In order to validate the interaction between mouse PVRIG and mouse PVRL2 we first tested the binding of PVRIG-Fc to cells over-expressing (OX) PVRL2. The level of PVRL2 expression on HEK293 OX PVRL2 sv1 was determined using specific anti-mouse PVRL2 antibodies. Mouse PVRL2 expression was 10-fold higher compared to HEK293 cells expressing empty vector (data not shown). Four batches of PVRIG-Fc were examined for binding to PVRL2 OX cells. All PVRIG-Fc batches showed 6-11-fold binding to cells OX PVRL2 compared to empty vector cells (data not shown). Binding of PVRIG-Fc to PVRL2 OX cells was also examined using biotinylated and fluorescently labelled (Alexa Fluor 647) PVRIG proteins. While the biotinylated proteins displayed slightly stronger binding to PVRL2 OX cells compared to untagged PVRIG-Fc (data not shown), fluorescently labelled PVRIG demonstrated much lower binding (data not shown). These results show that PVLR2 is detected on the membrane of HEK293 cells OC PVRL2; binding of mouse PVRIG-Fc to PVLR2 OX cells is detected by anti-mouse IgG2A antibodies; binding of biotinylated mouse PVRIG-Fc to PVLR2 OX cells is detected by streptavidin-PE, and binding of Alexa Fluor 647-labeled PVRIG-Fc to PVLR2 OX cells.

[0504] Binding of mouse PVRL2 to HEK293 cells OX PVRIG: To further validate the interaction between mouse PVRIG and mouse PVRL2 we tested the binding of PVRL2 to cells OX PVRIG with or without a FLAG-tag. Membrane expression of mouse PVRIG on HEK293 cells OX PVRIG with a FLAG-tag was confirmed using an anti-FLAG antibody (data not shown). As expected, HEK293 cells OX PVRIG without a FLAG-tag showed no expression using an anti-FLAG antibody. Using anti-PVRIG supernatants (Aldeveron), these cells demonstrated lower expression of PVRIG compared to cells OX PVRIG with a FLAG-tag. Commercial mouse PVRL2 recombinant protein was available only as a His-tagged protein. Therefore, extensive calibrations were required to obtain an appropriate anti-His antibody and conditions for detection. His-tagged PVRL2, from two different sources, were tested for binding to PVRIG OX cells at 60 μg/ml and demonstrated 2-fold (data not shown) and 3-4 fold (data not shown) binding compared to HEK293 cells expressing empty vector. That is, his-tagged mouse PVLR2 binds HEK293 OX mouse PVRIG, and mouse PVRIG is expressed on membranes of HEK293 cells OX PVRIG.

[0505] Study of mouse PVRIG and mouse PVRL2 interaction using SPR-Biacore: In order to assess the interaction between mouse PVRIG-Fc and mouse His-tagged PVRL2, both proteins were immobilized to a Biacore chip. Following immobilization, both proteins, as well as PVRIG-Fc (data not shown) were run as analytes at three concentrations: 2500, 500 and 100 nM (PVRIG batch #480 and PVRL2 were run twice as analytes). Interaction between the two proteins was detected in both directions and with both batches of PVRIG (data not shown). Due to complex kinetics, an exact KD could not be determined from the Biacore results.

[0506] Dose response binding of mouse PVRIG to HEK293 cells OX PVRL2 sv2 and B16-F10 cells: As shown above, mouse PVRL2 binding to mouse PVRIG OX cells was relatively low. In order to establish a method for screening anti-mouse PVRIG antibodies capable of blocking the interaction between mouse PVRIG and mouse PVRL2, the binding of PVRIG-Fc to PVRL2 OX cells was selected. First, a dose response binding curve of mouse IgG2A and mouse PVRIG-Fc to cells OX mouse PVRL2 was generated and compared to cells expressing empty vector (EV). The dose response was performed in two-fold serial dilutions (1:2) from 50 μg/ml to 0.1 μg/ml. While no difference in mouse IgG2A binding was observed (data not shown), PVRIG-Fc demonstrated saturation of binding at 12.5 μg/ml and reduced binding in correlation with the decrease in protein concentration (data not shown). Similar results were obtained also with PVRIG-Fc (data not shown). These results suggest that this binding assay can be considered for screening of blocking antibodies.

[0507] In order to consider also an endogenous system for screening of anti-mouse PVRIG antibodies, the expression of PVRL2 on B16-F10 cells was assessed using an anti-PVRL2 antibody. Results show that PVRL2 is highly expressed on B16-F10 cells (data not shown). Therefore, a similar dose response binding curve was produced also for binding of mouse IgG2A and mouse PVRIG-Fc to B16-F10 cells. Similarly to the results obtained with HEK293 cells OX PVRL2, mouse PVRIG-Fc demonstrated dose response binding to B16-F10 cells reaching saturation at 12.5 μg/ml, while no change in binding of mouse IgG2A was detected (data not shown).

[0508] Discussion and Conclusions: Human PVRIG interaction with human PVRL2 was identified using Cell Microarray Technology at Retrogenix. To validate this interaction also in mouse, several approaches were taken. Among them the use of PVRIG or PVRL2 OX cells, and biophysical measurements using SPR-Biacore. All approaches indicated that mouse PVRIG interacts with mouse PVRL2. However, the binding of mouse PVRL2 to cells OX PVRIG was relatively low compared to the binding of PVRIG to cells OX PVRL2. The reason for this could be the fact that commercial PVRL2 is available only as a monomer His-tagged protein and not as an Fc-fused protein (as for PVRIG). To this end, a custom Fc-fused mouse PVRL2 was produced at GenScript. However, from preliminary data, only a minor increase in binding was observed with this protein (˜5-fold compared to 2-3 fold with the PVRL2-his). Therefore, some other factors might influence this relatively low binding.

[0509] Due to the low PVRL2 binding to cells OX PVRIG, it was decided to establish an anti-PVRIG antibody blocking assay using PVRIG-Fc binding to cells OX PVRL2. According to the observed dose response curves we suggested three working concentrations: 0.1, 0.2 and 0.4 μg/ml. Following similar results obtained with binding of PVRIG to PVRL2 endogenously expressing B16-F10 cells, we suggested to perform the antibody blocking assay also on these cells at the following concentrations: 0.2, 0.4, 0.8 μg/ml.

[0510] PVRIG is a presumed receptor, therefore, preferably the antibody blocking assay should be performed with PVRL2 as a soluble protein and PVRIG expressed on the cells.

[0511] Thus, it should be considered to examine anti-mouse PVRIG antibodies that demonstrate blocking activity in the current format also in this system.

### Additional Validation Study 3

[0512] The objective of this study is to confirm the binding partners of PVRIG, a novel immuno-oncology target. Preliminary studies indicate that one of these ligands is PVRL2. In this study, binding of the recombinant PVRIG protein to several potential ligands in the PVRIG axis has been investigated by ELISA.

### Protocols

[0513] List of reagents: Current literature on the PVRIG proteins suggests that there are three potential ligands: PVR (CD155), PVRL2 (CD112), and PVRL3 (CD113). To investigate their ability to bind the PVRIG receptor, these three ligands were sourced commercially, as follows: PVR and PVRL3 from Sino Biologicals Inc. and PVRL2 from R&D Systems and Sino Biologicals Inc. The human PVRIG recombinant protein was generated at Compugen as the PVRIG extra-cellular domain (ECD) fused to a human IgG1 Fc domain (PVRIG H:H).

[0514] ELISA to determine receptor-ligand interaction: Commercially sourced His-tagged ligands, PVR, PVRL2, and PVRL3, were coated on the wells of a high binding EIA/RIA plate (Costar 9018) overnight at 4° C. An irrelevant His-tagged protein was included as a negative control. Coated plate wells were rinsed twice with PBS and incubated with 300 μL blocking buffer (5% skim milk powder in PBS pH 7.4) at room temperature (RT) for 1 hr. Blocking buffer was removed and plates were rinsed twice more with PBS. Plate-bound ligands were incubated with varying concentrations of PVRIG H:H in solution (linear range of 0.1 μg/mL to 4 μg/mL in a 50 μL/well volume) at RT for 1 hr. Plates were washed three times with PBS-T (PBS 7.4, 0.05% Tween20), then three times with PBS and 50 μL/well of a HRP-conjugated secondary antibody was added (Human IgG Fc domain specific, Jackson ImmunoResearch). This was incubated at RT for 1 hr and plates were washed again. ELISA signals were developed in all wells by adding 50 μL of Sureblue TMB substrate (KPL Inc) and incubating for 5-20 mins. The HRP reaction was stopped by adding 50 μL 2N H2SO4 (VWR) and absorbance signals at 450 nm were read on a SpectraMax (Molecular Devices) or EnVision (PerkinElmer) spectrophotometer. The data were exported to Excel (Microsoft) and plotted in GraphPad Prism (GraphPad Software, Inc.).

[0515] Results: PVRIG preferably binds to PVRL2: The human PVRIG Fc-fusion protein was assayed for binding to PVR, PVRL2 and PVRL3, which were immobilized on an EIA/RIA plate. Varying concentrations of the receptor PVRIG in solution phase were incubated with the immobilized ligand. The data clearly show dose-dependent binding of PVRIG H:H to PVRL2, but no binding to ligands PVR, PVRL3 or the negative control protein (data not shown). The ELISA A450 signal was plotted as a function of the receptor concentration using a one-site binding equation, revealing an equilibrium binding constant (KD) of 13±1 nM.

[0516] Summary and Conclusions: PVRIG is a novel immuno-oncology target for which the biology is not fully understood. In an effort to shed more light on this biology, we examined its binding to several potential ligands. PVRL2 was clearly identified as the binding partner of PVRIG. Quantitative analysis suggests that this interaction is very strong, with a KD of 13±1 nM. Our results also suggest that human PVRIG either does not bind the human PVR and PVRL3, or the binding is too weak to detect by ELISA.

### Additional Validation Study 4:

[0517] In this example, PVRIG expression on PBMC cell subsets was evaluated pre and post allo-activation. Following allo-activation the expression of PVRIG was upregulated on CD4+ T cells as well as on CD8+ T cells and double negative gamma delta T cells. This upregulation was observed in PBMCs of one out of two donors tested (see FIGS. 52A-52B).

### Example 6 Surface Plasmon Resonance Studies of PVR, PVRL2, and PVRL3 Binding to PVRIG, DNAM, and TIGIT

### Materials and Methods

[0518] All experiments were performed using a ProteOn XPR 36 instrument at 22° C.

[0519] Step 1: A high density goat anti-human fc polyclonal antibody surface (Invitrogen H10500) was prepared over all six lanes of a GLC chip using a ProteOn XPR 36 biosensor. The activation step for the anti-human fc surface occurred in the horizontal flow direction while the immobilization step for the high density pAb occurred in the vertical flow direction. The blocking step occurred in both the vertical and horizontal positions so that the horizontal “interspots” could be used as reference surfaces. An average of ˜4400 RU of goat anti-human pAb was immobilized on each lane.

[0520] Step 2: For each cycle, three different lots of human PVRIG fusion protein (human fc, GenScript lots 451, 448, 125), human DNAM-1 fusion protein (human fc, R&D Systems), human TIGIT fusion protein (human fc, R&D Systems), and a control human IgG (Synagis) were each captured over a different vertical lane for two minutes at a concentration of 2 μg/mL. PVR, two lots of PVRL2, and PVRL3 were each injected in the horizontal flow direction at six different concentrations over all six captured ligands at different ligand capture cycles. The injections were two minutes followed by 10 minutes of dissociation at a flow rate of 50 μL/min. The PVR concentration range was 1.4 nM-332 nM in a 3-fold dilution series, both lots of PVRL2 were injected at a concentration range of 1.3 nM-322 nM in a 3-fold dilution series, and PVRL3 was injected at a concentration range of 1.4 nM-334 nM in a 3-fold dilution series. All protein reagents were prepared in running buffer which was degassed PBS buffer with 0.05% Tween 20 and 0.01% BSA added. The anti-human fc capture surfaces were regenerated with two 30-second pulses of 146 mM phosphoric acid after each cycle.

[0521] Step 3: Sensorgram data of the analytes binding to each captured ligand were processed and double-referenced using ProteOn Manager version 3.1.0.6 making use of interspot referencing and a pre-blank injection identical to the analyte injections.

### Results

[0522] a) PVR: Binds weakly to captured DNAM-1 and TIGIT and shows no binding to all three lots of PVRIG and the control IgG. Not enough information was generated to estimate the KD of the PVR interactions with DNAM-1 and TIGIT (data not shown).

[0523] b) PVRL2: Both lots of PVRL2 showed binding to all three lots of PVRIG and to DNAM-1 but minimal or no binding to TIGIT and no binding to the control IgG. Sensorgrams showed complex kinetics, therefore binding constants could not be estimated (data not shown).

[0524] c) PVRL3: Showed minimal binding to TIGIT and did not bind the other proteins (data not shown).

### Example 7: In-Vitro Immunomodulatory Activities of PVRIG ECD-IG on Mouse T Cells

[0525] In these experiments the immunomodulatory activities of the recombinant fused protein PVRIG-ECD-Ig was investigated on mouse T cell activation. The effect of PVRIG-ECD-Ig on activation of mouse CD4 T cells was investigated using a number of in-vitro T cell activation readouts: cell activation markers, cytokine secretion and proliferation.

[0526] In order to evaluate the activity of pvrig protein on t cell activation, recombinant protein was produced comprising the mouse extracellular domain (ECD) of the mouse PVRIG fused to the Fc of mouse IgG2a (designated PVRIG-ECD Ig M:M). The effect of the fc fused protein co-immobilized with anti-cd3 on mouse cd4 t cell functions, as manifested by activation markers and cytokines secretion was investigated.

### Materials and Methods

[0527] Fc fusion protein and control Ig: Fc fusion protein, PVRIG-ECD-Ig (batch #198) was tested. Mouse IgG2a (clone MOPC-173; Biolegend or C1.18.4; BioXcell) was used as isotype control.

[0528] Mouse CD4 T cells isolation: Untouched CD4+CD25− T cells were isolated from pools of spleens of BALB/C mice using a T cell isolation Kit (Miltenyi Cat #130-093-227) according to the manufacturer's instructions. The purity obtained was >90%.

[0529] Activation of mouse CD4 T cells: Anti-mouse CD3-ε mAb (clone 145-2C11; BD Biosciences) at 2 μg/ml together with PVRIG-ECD-Ig protein or control Ig at various concentrations (1, 3 or 10 μg/ml), were co-immobilized for 3 hr at 37° C., on 96-well flat bottom tissue culture plates (Sigma, Cat. #Z707910). Control Ig was added to each well in order to complete a total protein concentration of 12 μg/ml per well. Wells were washed 3 times with PBS and plated with 1×10⁵ purified CD4+CD25− T cells per well and kept in a humidified, 5% CO2, 37° C. incubator. In some experiments, soluble anti-CD28 (clone: 37.51; eBioscience; 1 μg/ml) was added. Culture supernatants were collected at the indicated times post stimulation and analyzed for mouse IFNγ or IL-2 secretion by ELISA kits (R&D Systems). The effect of PVRIG-ECD-Ig protein (see FIGS. 103A-103BX) on the expression of the activation marker CD69 on mouse CD4+ T cells was analyzed by flow cytometry. Cells were stained 48 h post stimulation with a cocktail of antibodies including PerCP-anti-CD4 (clone G41.5; Biolegend), FITC or PE-anti-CD69 (clone H1.2F3; Biolegend), in the presence of anti-CD16/32 (clone 2.4g2; BD Biosciences) for blocking of Fcγ-receptors. Cells were evaluated using MACSQuant analyzer 9 (Miltenyi) and data analyzed using BD CellQuest or by MACSQuantify™ Software. Data was analyzed using Excel or Prism4 software.

### Results and Summary

[0530] Effect of PVRIG-ECD Ig M:M (see FIGS. 103A-103BX) on mouse CD4+ T cells function: FIGS. 15A-15E show in-vitro immunomodulatory activities of PVRIG-ECD-Ig (see FIGS. 103A-103BX) on isolated mouse splenic T cells (CD4+, >95% purity) stimulated with microplates co-immobilized with anti-CD3 (2 μg/ml) alone or co-immobilized with control Ig (mIgG2a) or PVRIG-ECD-Ig (see FIGS. 103A-103BX)) (10 μg/ml) in the presence of soluble anti-CD28 (1 μg/ml). PVRIG-ECD-Ig (see FIGS. 103A-103BX) suppressed mouse CD4 T cell activation in a dose dependent manner, as manifested by reduced CD69 up-regulation (FIG. 15A, D), and reduction in TCR-induced cytokines (IL-2 and IFNγ) secretion (FIG. 15B-C, E). The magnitude of the inhibitory effect of PVRIG-ECD-Ig (see FIGS. 103A-103BX) was in the range of 30-100%. Inhibitory effect of PVRIG-ECD-Ig (see FIGS. 103A-103BX) on IFNγ secretion was observed in concentrations as low as 3 μg/ml (˜60% inhibition vs. control Ig).

[0531] PVRIG-ECD-Ig (see FIGS. 103A-103BX) inhibits T cell activation in a concentration-dependent manner when the Fc fusion protein is co-immobilized with anti-CD3 on plates. Maximal inhibitory effect was observed at 10 μg/ml of PVRIG-ECD-Ig (see FIGS. 103A-103BX).

[0532] The results demonstrate the inhibitory effect of PVRIG-ECD-Ig on mouse T cells activation, manifested by reduced cytokine secretion, and suppression of activation marker CD69 upregulation. This inhibition of T cell activation, supports the therapeutic potential of immunoinhibitory PVRIG proteins (PVRIG polypeptides and fusion proteins) according to the present invention in treating T cell-driven autoimmune diseases, such as rheumatoid arthritis, multiple sclerosis, psoriasis and inflammatory bowel disease, as well as for other immune related diseases and/or for reducing the undesirable immune activation that follows gene therapy. In addition, these results also support the therapeutic potential of immunostimulatory PVRIG proteins (PVRIG polypeptides and fusion proteins) that reduce the inhibitory activity of PVRIG for treating conditions which should benefit from enhanced immune responses, in particular enhanced CTL immunity and proinflammatory cytokines such as cancer, infectious diseases, particularly chronic infections and sepsis wherein T cell-mediated depletion of diseased cells is therapeutically advantageous.

### Example 8: In-Vitro Immunomodulatory Activities of PVRIG on Human Cytotoxic T Cells (CTLs)

[0533] The experiments described in this example evaluated the effect of ectopic expression of human PVRIG on different melanoma cell lines on their ability to activate CTLs (cytotoxic T lymphocytes) and serve as targets for killing by these cells.

### Materials & Methods:

[0534] Three human melanoma cell lines which present the MART-1 antigen in HLA-A2 context (SK-MEL-23, Mel-624 and Me1-624.38) were used as targets for CTLs. Mel-888 which does not express HLA-A2, served as a negative control.

[0535] Ectopic expression of human PVRIG on cytotoxic T lymphocytes (CTLs): In order to express human PVRIG in peripheral blood leukocyte (PBL) cultures, the cDNA encoding for PVRIG was amplified using specific primers and cloned into an MSCV-based retroviral vector (pMSGV1) or in tripartite vectors: the CD8-dependent F4 TCR α- and β-chains were linked with a P2A sequence and cloned into pMSGV1 vector, either followed by an internal ribosome entry site (IRES) and PVRIG. The retroviral vector encoding for NGFR1, as negative control or in tripartite vectors: the CD8-dependent F4 TCR α- and β-chains were linked with a P2A sequence and cloned into pMSGV1 vector, either followed by an internal ribosome entry site (IRES) and NGFR. Verification of the cloning was done first using restriction enzyme digestion and subsequently by sequencing. Upon sequence confirmation, large amounts of the retroviral vector (Maxi-prep) were produced for subsequent use.

[0536] Peripheral blood leukocytes of healthy human donors were transduced with the retroviral constructs encoding PVRIG or with the retroviral vectors encoding for NGFR1 or an empty vector, as negative control. Transduction was carried out using a retronectin-based protocol; briefly, retroviral supernatant was produced in 293GP cells (a retroviral packaging cell line) following transfection with the retroviral vector and an amphotropic envelop gene (VSV-G). The retroviral supernatant was plated on retronectin-coated plates prior to the transduction to enable the binding of virions to the plate, and the PBLs were added to the plate for 6 hours. After that, the cells were replenished in a new culture vessel. Transduction efficiency and expression of the protein was determined by staining the transduced PBLs with commercial PVRIG specific rabbit polyclonal antibody or with commercial anti-NGFR (Cat. No 345108; BioLegend). Rabbit IgG (Sigma Cat. No. 15006) was used as isotype control, and as secondary antibody we used APC-conjugated anti-rabbit IgG (Jackson, Cat. No. 711-136-152).

[0537] Ectopic expression of the F4 T cell receptor on cytotoxic T lymphocytes (CTLs): In order to obtain effector lymphocytes that express the MART-1-specific F4 TCR, specifically recognizing MART-126-35-/HLA-A2 peptide-MHC complex, freshly isolated human PBLs previously transduced to express either with PVRIG, NGFR or an empty vector were stimulated with PHA and cultured for 5-10 days, and subsequently transduced with in vitro-transcribed mRNA encoding both α and β chains from the MART-1-specific F4 TCR. The transduced lymphocytes were cultured in lymphocyte medium (Bio target medium, fetal bovine serum (10%), L Glutamine Penicillin/Streptomicyn (100 units/nil), IL-2 300 IU), replenished every 2-3 days. F4 TCR expression levels were verified by FACS staining using a specific monoclonal antibody that recognizes the extra-cellular domain of the beta-chain from the transduced specific TCR. (TCR-Vb12-PE, (Cat. No IM2291; Beckman Coulter).

[0538] Cytokine secretion from PVRIG, NGFR or an empty vector and F4-TCR transduced lymphocytes upon co-culture with melanoma cells: PBLs expressing PVRIG or NGFR along with F4-TCR were co-cultured with un-manipulated melanoma cells. 10⁵ transduced PBLs were co-cultured with 10⁵ melanoma target cells for 16 hours. In order to assess the response of the effector CD8 T cells to the different tumor cell lines, cytokine secretion (IFNγ, IL-2 and TNF-α) was measured by ELISA in culture supernatants (IFNγ (Cat. No DY285E), IL-2 (Cat. No DY202E), TNF-α (Cat. No DY210E) R&D SYSTEMS), diluted to be in the linear range of the ELISA assay.

[0539] Cell mediated cytotoxicity assay: This assay was performed in order to asses target cell killing upon co-culture. PVRIG and F4 were expressed in PBLs using a bi-cystronic vector and co-cultured with CF SE labeled melanoma Target cells (labeled with 2 mM CFSE (eBioscience) for 6 min), at 37° C. for 18 hr, at E:T ratio of 3:1. Cells were collected after 18 hr and 1 mM propidium iodide (Sigma-Aldrich) was added for assigning the ratio of cell death. Samples were run on a CyAn-ADP flow cytometer (Beckman Coulter).

### Results:

[0540] General design of the experimental system: In the experimental system described herein, PVRIG is over expressed on human PBLs which are next manipulated to express the MART1-specific and HLA-A2 restricted F4 TCR. Over expressing cells are then co-cultured with HLA-A2 positive (name them) and HLA-A2 negative (names) melanoma cell lines (reference). The F4 TCR was recently used in clinical trials in terminally-ill melanoma patients to specifically confer tumor recognition by autologous lymphocytes from peripheral blood by using a retrovirus encoding the TCR (Morgan et al, 2006 Science, 314:126-129). The effect of PVRIG expression on antigen-specific activation of CD8 T cells by co-culture with cognate melanoma cells was assessed by cytokine secretion.

[0541] Over expression of PVRIG on human PBLs—experiment 1: Human PBLs were transduced with a retroviral vector encoding the PVRIG or an empty vector as negative control, as described in Materials & Methods. The levels of PVRIG were assessed by flow cytometry at 48 hrs after transduction, and compared to cells transduced with an empty vector. The percentage of the transgene-expressing cells was 62.4% as shown in FIG. 16.

[0542] Over expression of PVRIG on human PBLs—experiment 2: Human PBLs were transduced with a retroviral vector encoding the PVRIG or NGFR or an empty vector as negative controls, as described in Materials & Methods. The levels of PVRIG were assessed by flow cytometry at 48 hrs after transduction, and compared to cells transduced with an empty vector. The percentage of the PVRIG-expressing cells was in the range of 20%. The expression of NGFR was of 63% as shown in FIG. 17. A few additional attempts to over express PVRIG on PBLs were un-successful. One possibility is that the difficulty in expressing PVRIG in primary PBLs stems from a basal endogenous expression level in these cells.

[0543] Over expression of F4 TCR on human PBLs: To perform functional assays with human CTLs, we used PBLs engineered to express the F4 TCR, which recognizes HLA-A2+/MART1+melanoma cells, as described in Materials & Methods. FIG. 18A shows levels of F4 TCR expression obtained upon TCR transduction of leukocytes used in experiment 1, FIG. 18B shows levels of F4 TCR expression obtained upon TCR transduction of leukocytes used in experiment 2.

[0544] Effect of PVRIG expression on IFNγ secretion—experiment 1: PVRIG or Empty-vector and F4-transduced PBLs were co-cultured with melanoma cell lines. The levels of IFNγ secretion were measured at 16-hours of co-culture. As shown in FIG. 19, the magnitude of inhibition of IFNγ secretion due to PVRIG over-expression was more than 90%. Co-culture with the HLA-A2 negative cell line Mel-888 which served as a negative control, caused only a minor activation dependent IFNγ secretion from F4-transduced lymphocytes. PBLs not expressing the F4 TCR (designated W/O) serve as an additional negative control.

[0545] Effect of PVRIG expression on IFNγ secretion—experiment 2: PVRIG, NGFR or Empty-vector and F4 were transduced into PBLs in co-transduction (FIG. 20A) or using a bi-cystronic vector (FIG. 20B). Transduced PBLs were co-cultured with melanoma cell lines. The levels of IFNγ secretion were measured at 16-hours of co-culture. As shown in FIG. 20A, the magnitude of inhibition of cytokine secretion due to PVRIG over-expression was in the range of 30%. Co-culture with the HLA-A2 negative cell line Mel-888 which served as a negative control, caused only a minor activation dependent IFNγ secretion from F4-transduced lymphocytes. PBLs not expressing the F4 TCR (designated W/O) serve as an additional negative control. As shown in FIG. 20B, when PVRIG is co-transduced with the F4 TCR, no inhibition of IFNγ was observed.

[0546] Effect of PVRIG on CTL mediated killing activity—experiment 2: PVRIG or NGFR and F4 were transduced to PBLs using a bi-cystronic vector and co-cultured with CF SE labeled melanoma cell lines. As shown in FIG. 21, the percentage of propidium Iodide positive events (reflecting intensity of killing activity) was decreased by ˜50% by the expression of PVRIG relative to negative control NGFR transduced cells. Killing activity of PVRIG expressing cells is similar to that of co-culture between melanoma and PBLs not expressing the F4 TCR (designated W/O).

[0547] Summary: Without wishing to be limited by a single hypothesis, the results presented herein indicate that overexpression on primary lymphocytes results in reduced cytokine secretion by CTLs, suggesting that PVRIG has an inhibitory effect on CTLs.

### Example 9: Human Anti-PVRIG Antibodies

[0548] The objective of this study was to isolate human antibodies that bind to the PVRIG immuno-oncology target with high affinity and specificity, and block the interaction of PVRIG with its binding partner, PVRL2. This was achieved by panning a human fab fragment phage display library against a recombinant protein comprising the human PVRIG extracellular domain (ECD) fused to the human IgG1 Fc region, and screening the resulting antibodies for their ability to block the PVRIG interaction with PVRL2.

### Protocols

[0549] Functional QC of reagents: The purity of the panning reagent, PVRIG ECD fused to human IgG1 Fc domain (PVRIG H:H), was determined by Microfluidics Capillary Electrophoresis using a LabChip System (PerkinElmer). Activity of the panning reagent was validated by its ability to bind its ligand PVRL2.

[0550] ELISA to detect protein-protein interaction: His-tagged PVRL2 recombinant protein was diluted to 2 μg/mL in phosphate buffered saline (PBS) and 50 μL aliquots were coated on the wells of a high binding EIA/RIA plate (Costar) overnight at 4° C. Coated plate wells were rinsed twice with PBS and incubated with 300 μL blocking buffer (5% skim milk powder in PBS pH 7.4) at room temperature (RT) for 1 hr. Blocking buffer was removed and plates were rinsed twice more with PBS. Plate-bound PVRL2 was incubated with varying concentrations of PVRIG H:H in solution (linear range of 0.1 μg/mL to 4 μg/mL in a 50 μL/well volume) at RT for 1 hr. Plates were washed three times with PBS-T (PBS 7.4, 0.05% Tween20), then three times with PBS and 50 μL/well of a HRP-conjugated secondary antibody was added (Human IgG Fc domain specific). This was incubated at RT for 1 hr and plates were washed again. ELISA signals were developed in all wells by adding 50 μL of Sureblue TMB substrate (KPL Inc) and incubating for 5-20 mins. The HRP reaction was stopped by adding 50 μL 2N H2SO4 (VWR) and absorbance signals at 450 nm were read on a SpectraMax (Molecular Devices) or EnVision (PerkinElmer) spectrophotometer.

[0551] Preparation of biotinylated PVRIG: To facilitate phage panning in solution using streptavidin-coated magnetic beads, PVRIG H:H and an irrelevant human IgG1 Fc isotype control were biotinylated using Lightning-Link® Biotin kit (Innova Biosciences). Biotinylation reactions were performed following the manufacturer's protocol and the biotinylated reagents were stored at 4° C. for further QC and biopanning. The purity and activity of the biotin-labeled proteins was assessed by LabChip and functional ELISA, as described in Section 2.1. In addition, the degree of biotinylation was assessed by ELISA using two approaches: 1) the biotinylated reagents were adsorbed on a high binding EIA/RIA plate and the proteins were detected using HRP-conjugated streptavidin, and 2) the biotinylated proteins were incubated on EIA/RIA plate pre-coated with streptavidin and the binding was detected using a HRP-conjugated human IgG Fc domain specific secondary antibody.

[0552] Phage panning of human antibody library: Panning reactions were carried out in solution using streptavidin-coated magnetic beads to capture the biotinylated antigens. Note that all washing and elution steps were conducted using a magnetic rack to capture the beads (Promega). All incubation steps were conducted at room temperature with gentle mixing on a tube rotator (BioExpress). Four panning sub-campaigns were conducted, each with a different combination of antigen concentrations, washes and Fc-binder depletion steps (Table 1).

[0553] All the panning sub-campaigns were carried out using the biotinylated PVRIG H:H antigen. For each round of panning, the phage libraries were depleted against 100 pmol of an irrelevant human IgG1 Fc protein in two successive steps. Following depletion, sub-campaigns A and B involved panning against 50 nM of the antigen in each round, under low and high stringency wash conditions, respectively. Sub-campaigns C and D were identical to sub-campaign B, except that in campaign C the library was blocked with 10-fold excess of the irrelevant IgG1 Fc protein in panning rounds 2 and 3. Sub-campaign D differed in that 5 nM antigen was used in round 3.

TABLE 1
Antigen and washing conditions used for phage
panning against PVRIG H:H.

| Sub- | | Antigen | | |
|---|---|---|---|---|
| campaign | Round | Concentration | Washes | Fc Depletion |
| A | 1 | 50 nM | 3x PBS-T + 3x | 2X 100 pmol |
| | | | PBS | |
| | 2 | 50 nM | 3x PBS-T + 3x | 2X 100 pmol |
| | | | PBS | |
| | 3 | 50 nM | 3x PBS-T + 3x | 2X 100 pmol |
| | | | PBS | |
| B | 1 | 50 nM | 3x PBS-T + 3x | 2X 100 pmol |
| | | | PBS | |
| | 2 | 50 nM | 6x PBS-T + 6x | 2X 100 pmol |
| | | | PBS | |
| | 3 | 50 nM | 6x PBS-T + 6x | 2X 100 pmol |
| | | | PBS | |
| C | 1 | 50 nM | 3x PBS-T + 3x | 2X 100 pmol |
| | | | PBS | |
| | 2 | 50 nM | 6x PBS-T + 6x | 2X 100 pmol + |
| | | | PBS | block with 1 |
| | | | | nmol |
| | 3 | 50 nM | 6x PBS-T + 6x | 2X 100 pmol |
| | | | PBS | block with 1 |
| | | | | nmol |
| D | 1 | 50 nM | 3x PBS-T + 3x | 2X 100 pmol |
| | | | PBS | |
| | 2 | 50 nM | 6x PBS-T + 6x | 2X 100 pmol |
| | | | PBS | |
| | 3 | 5 nM | 6x PBS-T + 6x | 2X 100 pmol |
| | | | PBS | |

[0554] Preparation of phage library for panning: All phage panning experiments used the XOMA031 human fab antibody phage display library (XOMA Corporation, Berkeley, CA). Sufficient phage for a 50-fold over-representation of the library were blocked by mixing 1:1 with 10% skim milk powder in PBS (final skim milk concentration 5%) and incubating for 1 hr.

[0555] Antigen coupling to streptavidin beads: For each sub-campaign, three 100 μL aliquots of Dynal streptavidin-coated magnetic beads (Life Technologies) were blocked by suspension in 1 mL of blocking buffer (5% skim milk powder in PBS) and incubated for 30 mins. One blocked bead aliquot was mixed with 100 pmols of biotinylated PVRIG H:H. The other two aliquots were mixed with 100 pmols of the irrelevant antigen for depletion of Fc-only binders. Biotin-labeled antigens were coupled to the beads for 30 mins at RT. Bead suspensions were washed twice with PBS to remove free antigen and re-suspended in 100 μL blocking buffer.

[0556] 2.4.2. Depletion of human IgG1 Fc and streptavidin bead binders from the phage library: It was necessary to remove unwanted binders to streptavidin beads and the Fc region of PVRIG H:H before phage panning could commence. To achieve this, blocked phage was mixed with one 100 μL aliquot of uncoupled streptavidin beads and incubated for 45 mins. The beads (and presumably unwanted bead and human IgG1 Fc-binders) were discarded. This step was repeated once and depleted phage library supernatants were reserved for panning.

[0557] 2.5. Phage panning round 1: The blocked and depleted phage library was mixed with biotinylated PVRIG H:H coupled to magnetic beads described above. This suspension was incubated for 1 hr at RT with gentle rotation to allow binding of PVRIG H:H specific phage. Non-specific binders were removed by washing according to the protocol in Table 1. After washing, bound phage were eluted by incubation with 500 μL of 100 mM triethylamine (TEA) (EMD) for 15 mins at RT. The eluate was neutralized by adding 500 μL of 1 M Tris-HCl pH 8.0 (Teknova).

[0558] 2.5.1. Determination of phage titer: 10 μL of the initial phage library (input titer) or panning eluate (output titer) was serially diluted (10-fold) in PBS. A 90 μL aliquot of each phage dilution was mixed with 500 μL of TG1 E. coli cells grown to an optical density of ˜0.5 at 600 nm (OD 600 nm). Phage were allowed to infect the cells by stationary incubation for 30 mins, then shaking incubation (250 rpm) for 30 mins, all at 37° C. A 10 μL aliquot of each infected cell culture was spotted on a 2YT agar plate supplemented with 2% glucose and 100 μg/mL carbenicillin (2YTCG, Teknova). Plates were incubated overnight at 30° C. Colonies growing from each 10 μL spot were counted and used to calculate input and output titers.

[0559] 2.5.2. Phage rescue: The remaining phage eluate (˜1 mL) was mixed with 10 mL of TG1 E. coli cells grown to an OD 600 nm of 0.5. Phage were infected into cells as detailed in section 2.5.1. Infected cells were pelleted by centrifugation at 2500×G, re-suspended in 750 μL 2YT medium (Teknova) and spread on 2YTCG agar plates. These were incubated overnight at 37° C. and the resulting E. coli lawns were scraped and re-suspended in ˜20 mL liquid 2YTCG (Teknova). A small aliquot of re-suspended cells was inoculated into 50 mL 2YTCG to achieve an OD 600 nm of 0.05, and then grown at 37° C. with 250 rpm shaking until the OD reached 0.5. The resulting culture was infected with M13K07 helper phage (New England Biolabs) and incubated overnight at 25° C. with shaking to allow phage packaging. The culture supernatant containing rescued phage particles was cleared by centrifugation at 2500×G and 1 mL was carried over for either a) a subsequent round of panning or b) fab binding screens.

[0560] Phage panning rounds 2-3: Second and third rounds of panning were conducted as per the steps above, except that the rescued phage supernatant from the previous round was used in place of the phage library. The washing conditions, depletion and the antigen concentrations used are listed in Table 1.

[0561] Binding Screens Using Fabs Prepared from Periplasmic Extracts

[0562] Fab expression vectors: The XOMA031 library is based on phagemid constructs that also function as fab expression vectors. These vectors contain fab heavy chain and light chain expression cassettes, a lac promoter to drive expression of the antibody genes, and an ampicillin resistance gene. The antibody chains are appended with N-terminal signal peptides to drive their secretion into the periplasmic space. The C-terminal of the heavy chain carries a truncated gene III protein sequence for incorporation into phage particles. The heavy chain also carries hexa-histidine (SEQ ID NO:1556), c-myc and V5 affinity tags. Transformation of these vectors into E. coli and induction with isopropyl β-D-1-thiogalactopyranoside (IPTG) results in periplasmic expression of soluble fab molecules.

[0563] Fab PPE production: Eluted phage pools from panning round 3 were diluted and infected into TG1 E. coli cells (Lucigen) so that single colonies were generated when spread on a 2YTCG agar plate. This resulted in each colony carrying single fab clone. Individual clones were inoculated into 1 mL 2YTCG starter cultures in 96-well deep well blocks (VWR) using a Qpix2 instrument (Molecular Devices). These starter cultures were grown overnight in a Multitron 3 mm incubator (Infors) at 37° C. with 700 rpm shaking. For fab expression, 20 μL of 1 mL starter cultures were transferred into a second set of deep well plates containing 1 mL 2YT with 0.1% glucose and 100 μg/mL ampicillin. Cultures were grown until the average OD 600 nm was 0.5-1.0 and protein expression was induced by adding IPTG (Teknova) to a final concentration of 1 mM. Expression cultures were incubated overnight in the Multitron instrument at 25° C. with 700 rpm shaking.

[0564] Fab proteins secreted into the E. coli periplasm were extracted for analysis. Cells were harvested by centrifugation at 2500×G, the supernatants were discarded and pellets were re-suspended in 75 μL ice-cold PPB buffer (Teknova). Extracts were incubated for 10 mins at 4° C. with 1000 rpm shaking, and 225 μL ice-cold ddH2O was added and incubated for a further 1 hr. The resulting periplasmic extract (PPE) was cleared by centrifugation at 2500×G and transferred to separate plates or tubes for ELISA and FACS analysis. All extraction buffers contained EDTA-free Complete Protease Inhibitors (Roche).

[0565] Each plate of samples also included duplicate “blank PPE” wells to serve as negative controls. These were created by intentionally leaving two 1 mL cultures un-inoculated and then processing them in the same way as the fab PPEs, thereby creating a sample with no bacterial growth and therefore no fab expression.

[0566] Primary screen by ELISA: Two 96-well plates of PPE extracts per sub-campaign were tested for binding to PVRIG H:H by ELISA. Note that a non-biotinylated version of the protein was used for the ELISA screen to avoid the selection of biotin or streptavidin-binders. PVRIG H:H recombinant protein was diluted to 2 μg/mL in phosphate buffered saline (PBS) and 50 μL aliquots were coated on the wells of a high binding EIA/RIA plate (Costar) overnight at 4° C. Coated plate wells were rinsed twice with PBS and incubated with 300 μL blocking buffer (5% skim milk powder in PBS pH 7.4) at room temperature (RT) for 1 hr. Blocking buffer was removed and plates were rinsed twice more with PBS. Plate-bound PVRIG was incubated with the PPEs, pre-blocked with 3% skim milk, at RT for 1 hr. Plates were washed three times with PBS-T (PBS 7.4, 0.05% Tween20), then three times with PBS and 50 μL/well HRP-conjugated, anti-human Fab secondary antibody (Jackson ImmunoResearch) was added at a 1:2000 dilution in 5% milk in PBS. This was incubated at RT for 1 hr and plates were washed again. ELISA signals were developed in all wells by adding 50 μL of Sureblue TMB substrate (KPL Inc) and incubating for 5-20 mins. The HRP reaction was stopped by adding 50 μL 2N H2SO4 (VWR) and absorbance signals at 450 nm were read on a SpectraMax (Molecular Devices) or EnVision (PerkinElmer) spectrophotometer. Wells that showed signal over background (blank PPE) ratio>3 were selected as positive hits.

[0567] Sequence analysis of ELISA positive fabs: The positive hits from the ELISA screen were selected and re-arrayed into a new 96-well plate. The clones were grown overnight at 37° C. and the plasmid DNA was sequenced using heavy chain and light chain-specific primers. The sequences were assembled and analyzed using Xabtracker (XOMA) software. The clones were deemed sequence-unique if there were more than one non-conservative differences in the heavy chain CDR3. Clones with same or similar heavy chain but significantly different light chains were labeled as siblings of the original clone.

[0568] FACS screening of fabs as PPEs: The sequence-unique ELISA-positive fab clones were selected and analyzed for their ability to bind PVRIG over-expressing cells by fluorescence-activated cell sorting (FACS). Analyses were conducted using HEK293 cells over-expressing the human PVRIG antigen. In a parallel experiment, un-transfected HEK293 cells were used as a negative control for each fab sample.

[0569] The PPEs for the sequence-unique ELISA-positive fab clones were generated as described above. All the assays were conducted using FACS buffer (1% BSA and 0.1% sodium azide in PBS). The human PVRIG and un-transfected HEK293 cells were harvested, washed twice and re-suspended at a density of 2×10⁶ cells/ml. A 25 μl aliquot of cells was mixed with 25 μl of each PPE sample and incubated for 1 hr at 4° C. with gentle shaking. Two blank PPE controls were also included in the analysis. Plates were washed one time in 200 μl of FACS buffer and 50 μL of a 2 μg/mL dilution of a mouse anti-C-myc antibody (Roche) was added to each well. After incubation for 30 mins at 4° C., cells were washed again and 25 μl of a 5 μg/mL dilution of goat anti mouse fab-AF647 (Jackson Immunoresearch) was added to each PPE and negative control well. All secondary antibodies were incubated for 30 min at 4° C. After two washes, cells were re-suspended in a final volume of 50 μl of fixation buffer (2% paraformaldehyde in FACS buffer). Samples were read on an Intellicyt HTFC screening system, recording approximately 5000 events per well in a designated live gate. Data was analyzed using FlowJo (De Novo Software, CA, USA) and exported to Excel. Ratio of Mean Fluorescence Intensity (MFI) for the human PVRIG over-expressing HEK cells and the un-transfected 293 cells was calculated using Xabtracker software (XOMA). Positive hits on each plate were identified as those giving an MFI ratio 5-fold greater than the averaged blank PPE control signal.

[0570] Re-formatting of fab hits and production as human IgG molecules: Potential PVRIG binding fabs were converted to full length human IgGs for further characterization. Protein expression constructs were derived by PCR-amplification of variable heavy, lambda and kappa domain genes, which were sub-cloned into pFUSE-CHIg-hG1 (human IgG1 heavy chain), pFUSE2-CLIg-hK (human kappa light chain) or pFUSE2-CLIg-hL2 (human lambda 2 light chain) vectors, respectively (all expression vectors were sourced from Invivogen).

[0571] Expi293 cells (Life Technologies) were seeded at 6×10⁵ cells/ml in Expi293 medium (Life Technologies) and incubated for 72 hrs at 37° C. in a humidified atmosphere of 8% CO2 with shaking at 125 rpm. This cell stock was used to seed expression cultures at 2.0×10⁶ cells/ml in Expi293 medium. These cultures were incubated as above for 24 hrs with shaking at 135 rpm.

[0572] For transfection, cells were diluted again to 2.5×10⁶ cells/ml in Expi293 medium. The protein expression constructs for antibody heavy chain and light chain were mixed at a ratio of 1:2. For every 30 mL of expression culture volume, 30 μg of DNA and 81 μL of Expifectamine (Life Technologies) were each diluted separately to 1.5 mL with Opti-MEM (Life Technologies) and incubated for five minutes. Diluted DNA and Expifectamine were then mixed and incubated at RT for 20 mins. This was then added to the expression culture in a shaker flask and incubated as described above, with shaking at 125 rpm.

[0573] Approximately 20 hrs post-transfection, 150 μL of ExpiFectamine 293 transfection Enhancer 1 and 1.5 mL of ExpiFectamine 293 Transfection Enhancer 2 was added to each flask. Cultures were incubated for a further five days (six days post-transfection in total) and supernatants were harvested by centrifugation. IgGs were purified from the supernatants using an AKTA Pure FPLC (GE Healthcare Bio-Sciences) and HiTrap Mab Select Sure affinity columns (GE Healthcare Bio-Sciences) according to manufacturer's instructions.

[0574] FACS screening of reformatted IgG1 antibodies: FACS screening of the reformatted antibodies was done similarly to the PPE based screen described herein, except that a dose-dependent titration of the purified antibodies was performed. The human PVRIG over-expressing HEK293 cells, or the un-transfected HEK293 cells, were incubated with varying concentrations (0-10 μg/ml) of the anti PVRIG antibodies or isotype controls in FACS buffer at 4° C. for 60 mins. Cells were washed once in FACS buffer, re-suspended in 50 μl of Alexa Fluor 647 conjugated anti-human IgG (Fab fragment specific) diluted 1:200 and incubated for 30 mins at 4° C. in the dark. Cells were washed twice and re-suspended in a final volume of 80 μl of FACS buffer and Propidium Iodide (Biolegend cat #421301) diluted 1:1000. Samples were analyzed using an Intellicyt HTFC screening system (Intellicyt). Data was analyzed using FlowJo (DeNovo), exported to Excel (Microsoft) and plotted in GraphPad Prism (GraphPad Software, Inc.).

### Results

[0575] Functional QC of the PVRIG H:H recombinant protein: The purity of the PVRIG H:H protein was assessed by microfluidics capillary electrophoresis using a LabChip system. Under reducing conditions, the recombinant protein migrated at 80 kDa, consistent with its calculated molecular weight of 80.4 kDa, and showed 99% purity (data not shown). Under non-reducing conditions, one additional peak was observed which likely resulted from the presence of a dimeric form of the protein due to Fc-Fc interaction.

[0576] The functional integrity of the recombinant protein was assessed by evaluating its binding to PVRL2 (a known ligand for PVRIG) in ELISA. A dose-dependent response was observed for the binding of PVRIG H:H to PVRL2 (data not shown). In comparison, no binding was observed for a irrelevant human IgG1 Fc control. Taken together, this indicated that the PVRIG H:H recombinant protein is of high purity and is functionally active, and thus is suitable for biopanning.

[0577] QC of the biotinylated PVRIG H:H recombinant protein: The purity of the biotinylated PVRIG H:H protein was assessed by microfluidics capillary electrophoresis using LabChip system. No significant differences were observed between the non-biotinylated and the biotinylated recombinant proteins (data not shown). Note that an additional 44.3 kDa peak observed in the biotinylated protein sample. This peak may result from the monomeric form of the PVRIG H:H protein or maybe an artifact of the quenching reaction of the biotinylation kit.

[0578] Successful biotinylation was confirmed by incubating the biotinylated protein on a streptavidin-coated EIA plate and detecting the bound protein using a HRP-conjugated anti human IgG1 Fc secondary antibody. The binding of biotinylated PVRIG H:H to the streptavidin-coated EIA plate was comparable to a commercially sourced irrelevant biotinylated protein (data not shown).

[0579] Phage panning: The biotinylated PVRIG H:H protein was used for phage panning against the XOMA031 human fab antibody phage display library (XOMA Corporation, Berkeley, CA). Three rounds of biopannings were performed, under 4 different combinations of washing stringency, antigen concentration, and depletion of Fc binders (sub-campaigns A-D). The success of each round was estimated using the phage output titers. Qualitative guidelines were used to define the success of the panning sub-campaigns, such as significant reduction in phage titers after round 1, increase or maintenance of phage titers after rounds 2 and 3, and decrease in phage titers upon increasing wash stringency or decreasing antigen concentration. All 4 sub-campaigns resulted in phage titers in the expected range that were consistent among the sub-campaigns (data not shown).

[0580] Screening of phage output as fab PPEs: Two 96-well plates of fab clones (as PPEs) for each of the four sub-campaigns were screened to evaluate the success of biopanning. The results are summarized in table 3 and are discussed in further detail below. Overall, all 4 sub-campaigns yielded significant numbers of PVRIG H:H specific fabs. A total of 49 target-specific unique fabs were identified. The sub-campaigns B and D showed the highest ELISA hit rates and FACS correlation and were selected for an extended screen.

TABLE 3
Summary of pilot screen of fab PPEs. For each sub-campaign, the total
number of clones screened, ELISA hits, FACS hits and sequence uniqueness are listed. Open
reading frames (ORFs) represent the clones that were successfully sequenced as a full-length
fab. Specificity is based on the lack of non-specific binding to irrelevant proteins in ELISA.
FACS correlation represents the percent of ELISA hits that were also FACS positive
(specifically bound to PVRIG over-expressing HEK293 cells).

| | Sub A | Sub B | Sub C | Sub D | Overall |
|---|---|---|---|---|---|
| Clones | 182 | 182 | 182 | 182 | 728 |
| screened | | | | | |
| ELISA positive | 48 | 51 | 44 | 68 | 211 |
| (>3 S/N) | | | | | |
| ELISA Hit rate | 26% | 28% | 24% | 37% | 29% |
| ORFs | 36 (75%) | 45 (88%) | 35 (80%) | 63 (93%) | 179 (85%) |
| Unique | 25 | 21 | 17 | 31 | 73 |
| sequences | | | | | |
| Diversity | 69% | 47% | 49% | 49% | 41% |
| Specificity by | 100% | 100% | 100% | 100% | 100% |
| ELISA* | | | | | |
| FACS Binders | 14 | 17 | 14 | 24 | 49** |
| (>5 S/N) | | | | | |
| FACS | 56% | 81% | 82% | 77% | 67% |
| correlation | | | | | |

*No non-specific binding to irrelevant Fc conjugates or PVRL2;
**35 unique HCs, 14 siblings

[0581] Primary fab screen (ELISA): Two 96-well plates (182 fab clones) of PPEs for each sub-campaign were screened by ELISA against the PVRIG H:H recombinant protein. Note that although biotinylated protein was used for panning, the non-biotinylated version was used for the ELISA screen, which avoided detection of biotin or streptavidin-specific binders. The 4 sub-campaigns resulted in ELISA hit rates ranging from 24-37% when the threshold for a ‘positive’ signal was set at a 3-fold ratio of target-specific binding: blank PPE control signal.

[0582] Secondary screen (DNA sequence analysis, ELISA and FACS) fabs: The ELISA positive clones were sequenced to select non-redundant fabs. Seventy-three sequence-unique fab clones were identified. 19 clones were unique to sub-campaign A, 13 clones were unique to sub-campaign B, 10 clones were unique to sub-campaign C, 18 clones were unique to sub-campaign D, while the remaining 23 clones were shared between the campaigns. Sequence-unique, ELISA-positive fab clones were re-expressed as PPEs and screened for specific binding by FACS. A total of 49 out of 73 unique clones were identified as PVRIG specific ELISA and FACS binders (following the criteria established in 2.6.5). The 49 FACS binders corresponded to 35 antibodies with unique heavy chains and 14 siblings that have unique light chains but share the heavy chain with one of the unique clones. A summary of FACS binding data is presented in Table 4.

[0583] The sequence unique fabs were also tested for non-specific binding. All the fab PPEs analyzed bound to the PVRIG H:H recombinant protein with an assay signal greater than 3-fold over the blank PPE control. In a parallel assay, fab PPEs were tested for binding to two irrelevant proteins with the same IgG1 Fc region, as well as the PVRL2 recombinant protein. None of the clones showed significant non-specific binding to the controls, suggesting that the selected fabs are specific for PVRIG.

TABLE 4
FACS binding summary for PVRIG fabs. All unique ELISA positive fabs
were analyzed by FACS. The mean fluorescence intensity (MFI)
was measured for the PVRIG over-expressing HEK293 cells as
well as the un-transfected HEK293 cells. The MFI ratio for the
target-specific vs off-target binding was calculated. Clones with
MFI ratio > 5 were selected as hits and are listed below.

| fab clone | MFI ratio |
|---|---|
| CPA.7.001 | 11 |
| CPA.7.002 | 8.9 |
| CPA.7.003 | 9.5 |
| CPA.7.004 | 9.3 |
| CPA.7.005 | 6.5 |
| CPA.7.006 | 9.6 |
| CPA.7.007 | 14 |
| CPA.7.008 | 14 |
| CPA.7.009 | 10 |
| CPA.7.010 | 7.6 |
| CPA.7.011 | 10 |
| CPA.7.012 | 19 |
| CPA.7.013 | 12 |
| CPA.7.014 | 14 |
| CPA.7.015 | 15 |
| CPA.7.016 | 7.6 |
| CPA.7.017 | 13 |
| CPA.7.018 | 7.8 |
| CPA.7.019 | 16 |
| CPA.7.020 | 6.9 |
| CPA.7.021 | 15 |
| CPA.7.022 | 7.5 |
| CPA.7.023 | 12 |
| CPA.7.024 | 9.8 |
| CPA.7.025 | 6 |
| CPA.7.026 | 5.3 |
| CPA.7.027 | 9.2 |
| CPA.7.028 | 17 |
| CPA.7.029 | 6.7 |
| CPA.7.030 | 15 |
| CPA.7.031 | 8.5 |
| CPA.7.032 | 7.6 |
| CPA.7.033 | 22 |
| CPA.7.034 | 7.7 |
| CPA.7.035 | 14 |
| CPA.7.036 | 5 |
| CPA.7.037 | 5.3 |
| CPA.7.038 | 6.3 |
| CPA.7.039 | 12 |
| CPA.7.040 | 12 |
| CPA.7.041 | 7.6 |
| CPA.7.042 | 5.4 |
| CPA.7.043 | 13 |
| CPA.7.044 | 7.9 |
| CPA.7.045 | 7.8 |
| CPA.7.046 | 10 |
| CPA.7.047 | 8.4 |
| CPA.7.049 | 10 |
| CPA.7.050 | 22 |

[0584] Reformatting of the ELISA and FACS positive fabs into hIgG1: All unique ELISA and FACS binders were reformatted for expression as human IgG1 molecules in Expi293 cells. Out of the original 49 antibodies, 44 were successfully expressed as full-length antibodies. These reformatted antibodies were tested for retained binding to PVRIG over-expressing HEK293 cells alongside an irrelevant human IgG1 isotype control. All antibodies were also tested against un-transfected HEK293 cells. The resulting binding results were used to demonstrate the specificity of the antibodies and also plotted to calculate the equilibrium binding constant (KD). Nine out of the remaining 44 antibodies showed weak binding or significant non-specific binding. The remaining 35 antibodies were selected for further analysis in cell-based functional assays. The FACS-based KD of these antibodies are listed in Table 6. The KD values range from 0.30 nM to 96 nM, with a median of 9.4 nM, suggesting that most antibodies obtained from the panning campaign are very specific and bind to PVRIG with high affinity.

TABLE 5
Expression and binding summary of reformatted antibodies. All unique
ELISA and FACS positive fabs were reformatted into the human IgGI
backbone. FACS KD values were determined by dose titration against
the PVRIG over-expressing HEK293 cells. Off-target binding was
determined by dose titration against the un-transfected HEK293 cells

| Antibody | FACS KD (nM) |
|---|---|
| CPA.7.001 | No-expression |
| CPA.7.002 | 44.35 |
| CPA.7.003 | Non-specific binding |
| CPA.7.004 | 21.71 |
| CPA.7.005 | 95.56 |
| CPA.7.006 | No-expression |
| CPA.7.007 | 0.73 |
| CPA.7.008 | No-expression |
| CPA.7.009 | 33.00 |
| CPA.7.010 | 21.89 |
| CPA.7.011 | 66.02 |
| CPA.7.012 | 0.30 |
| CPA.7.013 | No-expression |
| CPA.7.014 | 2.04 |
| CPA.7.015 | 1.34 |
| CPA.7.016 | 22.02 |
| CPA.7.017 | 1.82 |
| CPA.7.018 | 9.29 |
| CPA.7.019 | 0.45 |
| CPA.7.020 | 86.97 |
| CPA.7.021 | 11.22 |
| CPA.7.022 | 4.17 |
| CPA.7.023 | 4.08 |
| CPA.7.024 | 9.08 |
| CPA.7.025 | Non-binder |
| CPA.7.026 | Non-binder |
| CPA.7.027 | Non-binder |
| CPA.7.028 | 7.14 |
| CPA.7.029 | Weak binding |
| CPA.7.030 | No-expression |
| CPA.7.031 | Non-binder |
| CPA.7.032 | 8.78 |
| CPA.7.033 | 12.8 |
| CPA.7.034 | 14.2 |
| CPA.7.035 | Non-binder |
| CPA.7.036 | 6.0 |
| CPA.7.037 | Non-specific binding |
| CPA.7.038 | 20.26 |
| CPA.7.039 | 3.76 |
| CPA.7.040 | 0.79 |
| CPA.7.041 | 52.2 |
| CPA.7.042 | 24.26 |
| CPA.7.043 | 13.2 |
| CPA.7.044 | 9.4 |
| CPA.7.045 | 3.73 |
| CPA.7.046 | Non-specific binding |
| CPA.7.047 | 5.36 |
| CPA.7.049 | 19.9 |
| CPA.7.050 | 68.3 |

### Summary and Conclusions

[0585] A phage display antibody discovery campaign was conducted to isolate binders against the immuno-oncology target PVRIG using a recombinant Fc-tagged version of the antigen. Quality control analysis showed that the panning antigen was pure and functionally active. The panning effort yielded 49 unique fab clones that specifically bound to the PVRIG target, both as a recombinant protein and on the cell surface. Of these, 35 were successfully produced as human IgG1 antibodies and were shown to retain specific binding to the PVRIG. This pool of antibodies displayed high affinities in a FACS assays, with 18 out of 35 antibodies binding with a KD<10 nM.

### Example 10 Demonstration of the Ability of the Anti-Human PVRIG FABS to Block the Interaction Between PVRIG and PVRL2 by ELISA

[0586] Method: The human PVRL2-His (Catalog #2229-N2-050/CF, R&D Systems), was coated on the ELISA plate. Fab periplasmic extracts (PPEs), diluted 1:1 in 5% skim milk, were preincubated with 1 μg/ml (final concentration) of the human PVRIG-Fc, for 15 min at RT. The fab-receptor mixture was allowed to bind the PVRL2-His coated on the ELISA plate. The PVRIG-Fc/PVRL2-His interaction was probed using anti-human Fc antibody, conjugated to HRP (Jackson Immuno Research catalog #709-035-098). In the absence of PPE (negative wells), a strong positive signal was expected. For blocking fabs, the signal would be significantly reduced. The fab clones with >5-fold lower signal than the negative wells (>80% blocking) could be selected as blocking fabs.

### Protocol:

[0587] ELISA plates (Costar 9018) were coated with 50 ul of 2 μg/ml antigen and were stored at 4° C. overnight. The antigen-coated plates were washed 3 times with 1×PBS. The plate was blocked with 200 μl of 5% skim milk in PBS and incubated 1 hr at RT (room temperature). Next the plate was washed with 1×PB.

[0588] After adding 50 μl/well of Fab PPEs (diluted in 5% skim milk), the plate was preincubated with 1 μg/ml of the human PVRIG-Fc that was added to the respective wells. The “no fab” control was performed with 2 wells.

[0589] The plate was incubated 1 hr at RT.

[0590] The plates were washed 3 times with 1×PBST and 3 times with 1×PBS.

[0591] After adding 50 μl/well of the HRP-conjugated secondary antibody (Jackson Immuno Research, 709-035-098), diluted in 5% milk in PBS, the plate was incubated 1 hr at RT.

[0592] The plates were washed 3 times with 1×PBST and 3 times with 1×PBS.

[0593] After adding 50 μl/well of the TMB substrate and waiting until the color develops, the reaction was stopped by adding 50111/well of 2N H2504. Absorbance was measured at 450 nm.

### Results

[0594] FIG. 52 shows the results of testing anti-PVRIG antibodies for their ability to block at least 80% of PVRL2 binding to PVRIG. As shown, a large number of such antibodies were able to successfully block at least 80% of the binding. Specifically the antibodies which blocked successfully are designated as follows:

[0595] CPA.7.001, CPA.7.003, CPA.7.004, CPA.7.006, CPA.7.008, CPA.7.009, CPA.7.010, CPA.7.011, CPA.7.012, CPA.7.013, CPA.7.014, CPA.7.015, CPA.7.017, CPA.7.018, CPA.7.019, CPA.7.021, CPA.7.022, CPA.7.023, CPA.7.024, CPA.7.033, CPA.7.034, CPA.7.036, CPA.7.040, CPA.7.046, CPA.7.047, CPA.7.049, CPA.7.050,

### Example 11: Surface Plasmon Resonance Study of Epitope Binning of 37 Anti PVRIG IGG Antibodies Binding to Human PVRIG Fusion Protein

### Materials and Methods

[0596] Experiments were performed using a ProteOn XPR 36 instrument at 22° C. with all samples kept at 4° C. during the experiment.

[0597] Step 1: The following anti-PVRIG mAbs were each diluted to ˜10 μg/mL in 10 mM sodium acetate, pH 5.0 and covalently immobilized on independent spots on a ProteOn GLC biosensor chip using standard amine coupling:

CPA.7.002
CPA.7.003
CPA.7.004
CPA.7.005
CPA.7.007
CPA.7.009
CPA.7.010
CPA.7.011
CPA.7.012
CPA.7.014
CPA.7.015
CPA.7.016
CPA.7.017
CPA.7.018
CPA.7.019
CPA.7.020
CPA.7.021
CPA.7.022
CPA.7.023
CPA.7.024
CPA.7.026
CPA.7.028
CPA.7.029
CPA.7.032
CPA.7.033
CPA.7.034
CPA.7.036
CPA.7.037
CPA.7.038
CPA.7.039
CPA.7.040
CPA.7.043
CPA.7.045
CPA.7.046
CPA.7.047
CPA.7.050

[0598] The activation step occurred in the horizontal flow direction for five minutes while the immobilization step occurred in the vertical flow direction. MAbs were injected for four minutes after surface activation. The blocking step occurred in both the vertical and horizontal positions at five minutes each so that the horizontal “interspots” could be used as reference surfaces. MAbs were immobilized at a range of ˜450RU-5000RU. An additional mAb CPA.7.041 was also binned in this study, but only as an analyte in solution. See below.

[0599] Step 2: Preliminary experiments involved several cycles of injecting ˜20 nM PVRIG antigen (PVRIG H:H-2-1-1 #448, GenScript) over all immobilized mAbs for three minutes at a flow rate of 25 μL/min followed by regeneration with a 30-second pulse of 10 mM glycine-HCl, at either pH 2.0 or pH 2.5, depending on the horizontal row of mAbs in the GLC chip array. Antigen samples were prepared in degassed PBST (PBS with 0.05% Tween 20) running buffer with 100 μg/mL BSA. These preliminary experiments showed that clones CPA.7.026 and CPA.7.029 did not bind to the antigen and were therefore not binned. The remaining mAbs on the ProteOn array showed reproducible binding to the antigen.

[0600] Step 3: A “pre-mix” epitope binning protocol was performed because of the bivalency of the fc-fusion PVRIG antigen. In this protocol each mAb listed in Step 1, plus mAb CPA.7.041, was pre-mixed with PVRIG antigen and then injected for three minutes over all immobilized mAbs. The molar binding site concentration of each mAb was in excess of the molar antigen binding site concentration. The final binding site concentration of each mAb was ˜400 nM and the final binding site concentration of the antigen was ˜20 nM. An antigen-only control cycle was performed after very eight mAb injection cycles to monitor the activity of the immobilized mAbs throughout the experiment. Buffer blank injections were also performed after about every eight mAb injection cycles for double-referencing. Additional controls included each mAb injected alone over all immobilized mAbs at concentrations identical to the pre-mix injection cycles. All surfaces were regenerated with a 30 second pulse of 10 mM glycine-HCl at either pH 2.0 or pH 2.5 depending on which row of mAbs in the array was being regenerated, and all cycles were run at a flow rate of 25 μL/min. MAb and antigen samples were prepared in degassed PBST running buffer with 100 μg/mL BSA.

[0601] Step 4: Sensorgram data were processed and referenced using ProteOn Manager Version 3.1.0.6 using interspots and buffer blanks for double-referencing. The mAb-only control injections were used as the injection references where significant binding with the mAb-only injections was observed. An antibody pair was classified as having a shared antigen binding epitope (designated as a red “0” in the matrix in FIG. 43) if no binding was observed from the injection of mixed mAb and antigen over the immobilized mAb, or if binding was significantly reduced as compared to the antigen-only control injection over the same immobilized mAb. An antibody pair was classified as binding to different antigen epitopes, or “sandwiching” the antigen (designated as a green “1” in the matrix in FIG. 43) if the injection of mixed mAb and antigen showed binding to the immobilized mAb similar to or greater than the antigen-only control over the same immobilized mAb.

[0602] Step 5: The blocking pattern for mAb CPA.7.041 (#37) was studied only as an analyte because the GLC chip array has only 36 spots. Therefore for consistency, hierarchical clustering of the binding patterns in the binary matrix for each mAb pre-mixed with antigen (vertical patterns inFigure 42) was performed using IMP software version 11.0.0. The blocking patterns of the immobilized mAbs (horizontal patterns in FIG. 42) were also clustered as a comparison to the blocking patterns of the mAbs pre-mixed in solution (data not shown, see Results for discussion).

[0603] Results: FIG. 42 shows the binary matrix of the blocking (“0”) or sandwiching (“1”) between each mAb pair where the mAbs are listed in identical order both vertically (mAbs on the surface—“ligands”) and horizontally (mAbs in solution—“analytes”). Identical “bins” of blocking patterns for all mAbs as analytes are highlighted in FIG. 42 with a black box around each group of similar vertical patterns. FIG. 43 shows the dendrogram of the vertical (analyte) blocking patterns in the matrix in FIG. 42. For the strictest definition of an epitope “bin” where only those mAbs which show identical blocking patterns technically bin together, there are a total of 4 discrete bins. Specifically, 33 of the 35 mAbs that were binned comprise two bins where the only difference between these two bins is whether a mAb sandwiches (Bin 2, see FIGS. 42 and 43) with or blocks (Bin 1, see FIG. 42 and FIG. 43) binding to CPA.7.039. This means that CPA.7.039 is in its own separate bin. The fourth bin consists only of mAb CPA.7.050 which is unable to block antigen binding to any of the other 34 mAbs. Hierarchical clustering of the blocking patterns of the mAbs as ligands (horizontal patterns in FIG. 42) showed mAb CPA.7.016 sandwiching antigen with mAb CPA.7.039 whereas as an analyte it blocks antigen binding to immobilized CPA.7.039. Hence clone CPA.7.016 would be placed in bin 2 rather than in bin 1. The mAbs in each bind are listed in FIG. 43. Processed sensorgram data representative of each bin are shown in FIG. 44 to FIG. 47JJ.

[0604] Summary: 35 anti-PVRIG IgG mAbs were binned using SPR according to their pair-wise blocking patterns with fc fusion human PVRIG. By the strictest definition of an epitope bin, there are a total of four discrete bins. 33 of the 35 mAbs comprise two bins which differ only by whether their respective component mAbs block or sandwich antigen with clone CPA. 7.039.

### Example 12 Surface Plasmon Resonance Kinetic Screen of 50 Anti-PVRIG Human Fabs Prepared in Periplasmic Extracts

### Materials and Methods

[0605] All experiments were performed using a Biacore 3000 instrument and a ProteOn XPR 36 instrument at 22° C.

[0606] Step 1: The molar concentration of all 52 fabs in periplasmic extract supernatant were quantitated using a Biacore 3000 instrument at 22° C. Each fab was diluted 20-fold and then injected for 2 minutes at 5 μL/min over high density anti-human fab (GE Healthcare 28-9583-25) surfaces prepared using standard amine coupling with a CM5 Biacore chip (GE Healthcare). A standard human fab at a known concentration (Bethyl P80-115) was then injected over the anti-fab surface with the same conditions as the fab supernatants. Samples were prepared in the running buffer which was degassed HB SP (0.01 M HEPES, 0.15 M NaCl, 0.005% P20, pH 7.4) with 0.01% BSA added. The association slopes of each SPR sensorgram from each fab supernatant was fit against the SPR association slope of the standard human fab of known concentration using CLAMP 3.40 software to estimate the molar concentrations of each fab in supernatant.

[0607] Step 2: A high density goat anti-human fc polyclonal antibody surface (Invitrogen H10500) was prepared using standard amine coupling over two lanes of a GLC chip using a ProteOn XPR 36 biosensor. A high density anti-mouse fc polyclonal antibody surface (GE Healthcare BR-1008-38) was prepared using standard amine coupling over two different lanes of the same GLC chip. The activation and blocking steps for all four capture surfaces occurred in the vertical flow direction. Each fab in supernatant was then injected at three concentrations over fc-fusion human PVRIG (PVRIG-HH-2-1-1 #448, GenScript) and fc-fusion mouse PVRIG (PVRIG-MM-2-1-1 #198, GenScript) which were captured to one high density anti-human fc surface and one anti-mouse fc surface (respectively) at an average of ˜200RU and ˜290RU per cycle, respectively. Each fab concentration series was injected for two minutes followed by 10 minutes of dissociation at a flow rate of 50 μL/min. The starting concentration range (as determined in Step 1) was ˜20 nM-˜400 nM with two three-fold dilutions of the highest concentration for each fab. Fabs were diluted into the running buffer which was degassed PBS with 0.05% Tween 20 and 0.01% BSA added. The anti-human fc capture surfaces were regenerated with two 30-second pulses of 146 mM phosphoric acid after each cycle and the anti-mouse fc surfaces were regenerated with two 30-second pulses of 10 mM glycine, pH 1.7 after each cycle.

[0608] Step 3: Sensorgram data of fabs in supernatant binding to captured PVRIG were processed and double-referenced using ProteOn Manager version 3.1.0.6. The sensorgrams were double-referenced using the corresponding anti-species capture surfaces with no captured PVRIG as reference surfaces and a blank injection over the captured PVRIG under identical conditions as the injections of the fabs. Where possible, the sensorgrams for the three different concentrations of each fab were then globally fit to a 1:1 kinetic model (with a term for mass transport) to estimate the association and dissociation rate constants. Sensorgrams which did not show simple 1:1 binding were not fit with the kinetic model and therefore were not assigned estimates for kₐ and kₐ.

### Results

[0609] None of the fabs included in this study showed binding activity to mouse PVRIG (data not shown). Sensorgrams for 17 of the 50 fabs screened against the human PVRIG could be fit for reliable estimates of their rate constants. Twenty eight clones showed complex kinetics, five of the fabs did not show any binding to the captured human PVRIG fusion protein (CPA.7.025, CPA.7.026, CPA.7.027, CPA.7.029, CPA.7.035) and one clone (CPA.7.035) showed no titer when performing the concentration determination in Step 1. The rate constants and their corresponding sensorgrams are shown below in FIG. 49 and FIGS. 50A-50Q. The clones listed below showed complex kinetics. FIGS. 51A-51C shows some examples of these data.

| | | | |
|---|---|---|---|
| CPA.7.001 | CPA.7.006 | CPA.7.013 | CPA.7.045 |
| CPA.7.030 | CPA.7.036 | CPA.7.014 | CPA.7.046 |
| CPA.7.031 | CPA.7.037 | CPA.7.041 | CPA.7.017 |
| CPA.7.032 | CPA.7.009 | CPA.7.042 | CPA.7.018 |
| CPA.7.033 | CPA.7.038 | CPA.7.043 | CPA.7.047 |
| CPA.7.034 | CPA.7.039 | CPA.7.016 | CPA.7.023 |
| CPA.7.003 | CPA.7.011 | CPA.7.044 | CPA.7.024 |

### Example 13: Measuring the Binding Affinity of IGG Clone CPA.7.021 to PVRIG Expressed on HEK Cells Using Flow Cytometry

### Materials and Methods

[0610] Flow cytometry was used to measure the affinity of CPA.7.021 IgG binding to human PVRIG expressed on HEK 293 cells. CPA.7.021 conjugated with Alexa 647 was added in duplicate at a binding site concentration range of 3 pM-101 nM in a 2-fold serial dilution to a constant number of cells (100,000 cells/well) over 17 wells in a 96-well plate. One well contained cells without any added IgG to serve as a blank well. The cells were equilibrated for 4 hours with IgG at 4° C. Cells were washed twice and then the Mean Fluorescence Intensity (MFI) was recorded over approximately 10,000 “events” using an Intellicyte flow cytometer. The resulting MFI values as a function of the CPA.7.021 IgG binding site concentration are shown below. The KD of CPA.7.021 binding to HEK 293 cells expressing human PVRIG was estimated by fitting the MFI vs. the IgG binding site concentration curve with a 1:1 equilibrium model as detailed in Drake and Klakamp, Journal of Immunol Methods, 318 (2007) 147-152.

[0611] Results: Alexa647 labelled CPA.7.021 IgG was titrated with HEK 293 cells expressing human PVRIG and the binding signal was measured using flow cytometry. The resulting binding isotherm, showing MFI in duplicate vs. the binding site concentration of CPA.7.021, is presented below. The red line is a 1:1 equilibrium fit of the curve that allows for a KD estimate of 2.5 nM±0.5 nM (95% confidence interval of the fit, N=1).

### Example 14 Effect of PVRIG Knock Down (KD) and Anti-PVRIG Antibody on Human Melanoma Specific Tils Function

[0612] The aim of these assays is to evaluate the functional capacity of PVRIG in human derived TILs, as measured by activation markers and cytokine secretion, upon co-culture with melanoma target cells. PD1 was used as a benchmark immune-checkpoint for the knock down (siRNA) studies. The effect of anti-PVRIG antibody (CPA.7.21), which has been shown to block the interaction of PVRIG and PVRL2, alone or in combination with other antibodies (e.g aTIGIT, DNAM1) was evaluated.

### Materials and Methods

### TILs

[0613] Tumor-infiltrating lymphocytes (TILs) from three melanoma patients were used:
[0614] TIL-412-HLA-A2-Mart1 specific
[0615] TIL-F4-HLA-A2-gp100 specific
[0616] TIL-209-HLA-A2-gp100 specific

[0617] TILs were thawed in IMDM (BI, 01-058-1A) full medium supplemented with 10% human serum (Sigma, H3667)+1% Glutamax (Life technologies, 35050-038)+1% Na-Pyruvate (Biological Industries, 03-042-1B)+1% non-essential amino acids (Biological Industries, 01-340-1B)+1% Pen-Strep (Biological Industries, 03-031-1B)+300 U/ml of rhIL2 (Biolegend, 509129).

[0618] Tumor cell lines: Human melanoma cells Mel-624 express MART-1 and gp-100 antigens in the context of MHC-I haplotype HLA-A2. Cells were cultured in complete DMEM medium (Biological Industries, 01-055-1A) supplemented with 10% FBS (BI, 04-127-1A), 25 mM HEPES buffer (BI, 03-025-1B), 1% Glutamax (Life technologies, 35050-038), and 1% Pen-Strep (Biological Industries, 03-031-1B).

[0619] Knock down in TILs: Knock-down (KD) of human PVRIG and human PD1 in TILs was done using 100 pmol of Dharmacon ON-TARGETplus human PVRIG siRNA—SMARTpool (L-032703-02) or Human PD1 siRNA—SMARTpool (L-004435) or non-targeting siRNA (D-001810-01-05). siRNA were electroporated to TILs (AMAXA, program X-005). Electroporation was done on resting TILs cultured in full IMDM supplemented with IL-2 24 hr post thawing. After the electroporation TILs were seeded in 96 well TC plate to recover for 24 hr. After 24 hr, cells were harvested and stained with viability dye (BD Horizon; Cat #562247, BD biosciences), washed with PBS and stained with anti-human PVRIG—CPA.7.021 (CPA.7.021 IgG2 A647, 7.5 μg/ml) or with anti-human PD-1 (Biolegend, #329910 AF647, 5 μg/ml) in room temperature for 30 min. isotype control used are synagis (IgG2 A647, 7.5 μg/ml) and mouse IgG1 (Biolegend #400130 A647, 5 μg/ml) respectively. All samples were run on a MACSQuant analyzer (Miltenyi) and data was analyzed using FlowJo software (v10.0.8).

[0620] Co-culture of TILs with 624 melanoma cells: siRNA electroporated TILs were harvested and seeded in 96 TC plate 5×104/well. Mel-624 cells were harvested as well and seeded in 1:1/1:3 E:T ratios in co-culture. The plate was incubated overnight (18 hr) in 37° C., 5% CO2.

[0621] To assess the effect of anti-PVRIG antibody (CPA.7.021), anti-TIGIT (Clone 10A7) and anti-DNAM1 (clone DX11) on melanoma specific TIL activity, TILs (1×10⁵ cells/well) were pre-incubated with tested antibodies or relevant isotype controls in mono-treatment (10 μg/mL) or in combination-treatment (final 10 μg/mL for each) prior to the addition of 624 Melanoma target cells at a 1:1 Effector:target ratio. The plate was incubated overnight (18 hr) in 37° C., 5% CO2.

[0622] Assessment of TILs activation: 16 hours post co-culture, cells were stained with viability dye (BD Horizon; Cat #562247, BD biosciences), washed with PBS and exposed to Fc blocking solution (cat #309804, Biolegend), followed by surface staining with anti-CD8a (Cat #301048, Biolegend) and anti-CD137 (Cat #309804, Biolegend) in 4° C. for 30 min. All samples were run on a MACSQuant analyzer (Miltenyi) and data was analyzed using FlowJo software (v10.0.8). Culture supernatants were collected and analyzed for cytokine secretion by CBA kit (Cat #560484, BD).

### Results

[0623] PVRIG Knock-Down in TILs: TIL MART-1 and TIL F4 were cultured 24 hr with IL-2. 100 pmol of ON-TARGETplus human PVRIG siRNA—SMART pool (L-032703-02) or Human PD1 siRNA—SMARTpool (L-004435) or non-targeting siRNA (D-001810-01-05) were electroporated to TILs (AMAXA, program X-005). Detection of PVRIG or PD-1 was performed 24 hr post electroporation (and prior to co-culture). Cells were stained for viability dye followed by 30 min RT incubation with anti PVRIG or anti PD-1. The percentage of KD population is indicated in FIG. 82.

[0624] Functional assay using knocked down TILs: Human TILs, cultured for 24 hours with IL2 were electroporated with siRNA encoding for human PVRIG or PD-1 or scrambled sequence as control. TILs were tested for PVRIG and PD-1 expression 24 hr post electroporation. ˜80% knock down of PVRIG and ˜50% knock down of PD-1 compared to scrambled-electroporated TILs was observed (FIG. 82).

[0625] KD TILs were cultured with Mel-624 cells in 1:1 or 1:3 E:T for 18 hr and were stained for the expression of CD137. Elevated levels of activation marker CD137 were shown in TIL MART-1 electroporated with PVRIG siRNA, similarly to TILs that were electroporated with PD-1 siRNA, compared to control scrambled siRNA. Co-culture supernatant was collected and tested for the presence of secreted cytokines. TILs that were electroporated with PVRIG siRNA show a significant increase in IFNγ and TNF levels compared to control SCR siRNA. A similar effect was shown in TILs that were electroporated with PD-1 siRNA (FIGS. 83B and 83C).

[0626] The same trend of increase in activation levels was observed in TIL F4. Co-culture of PVRIG siRNA electroporated TIL F4 with Mel-624 in 1:3 E:T led to increased levels of CD137 surface expression (FIG. 84A) as well as increased secretion of IFNγ in co-culture supernatant (FIG. 84B). Similar trends were observed in TILs that were electroporated with PD-1 siRNA.

[0627] Functional assay using blocking Abs:

[0628] In vitro monotherapy and combo therapy of anti-PVRIG and anti-TIGIT: 209 TILs were cultured with Mel-624 cells in 1:1 E:T for 18 hr. Co-culture supernatant was collected and tested for the presence of secreted cytokines. Treatment with anti TIGIT did not affect IFNγ or TNF secretion levels. However, an increase in IFNγ and TNF levels was observed when anti TIGIT and anti PVRIG were added to co-culture in combination (FIGS. 85A and 85B).

[0629] In vitro monotherapy and combo therapy of anti-PVRIG and anti-TIGIT: 209 TILs were cultured with Mel-624 cells in 1:1 E:T for 18 hr. TILs were stained for surface expression of activation marker CD137 and showed reduced level of expression upon treatment with anti DNAM-1. Co-culture supernatant was collected and tested for presence of secreted cytokines. Treatment of anti DNAM-1 mediated a trend to increase secreted cytokines IFNγ and TNF. Treatment with anti DNAM-1 and anti PVRIG in combination partially reversed the effect on CD137 expression (FIG. 86C) and enhanced the effect on cytokine secretion IFNγ and TNF (FIG. 5A-B). MART-1 TILs were cultured with Mel-624 cells in 1:1 E:T for 18 hr. Co-culture supernatant was collected and tested for the presence of secreted cytokines. Treatment with anti DNAM-1 reduced CD137 surface expression on TILs and also the secreted cytokines IFNγ and TNF. Treatment with anti DNAM-1 and anti PVRIG in combination partially reversed these effects (FIGS. 86D-86F).

### Summary and Conclusions

[0630] PD1 KD improved TIL activity, as measured by IFNγ and secretion in F4 and MART-1 TILs. An increase (˜20%) of IFNγ and TNF secretion was observed upon PVRIG KD in MART-1 TILs compared to control siRNA. The same trend was observed in CD137 expression upon co-culture with 624 Melanoma cells on F4 TILs.

[0631] Treatment of anti-TIGIT did not affect IFNγ or TNF secretion levels from TILs co-cultured with 624 Mels, however, an increase in IFNγ and TNF levels was observed when anti TIGIT and anti PVRIG (CPA.7.021) were added to co-culture in combination.

[0632] Anti DNAM-1 treatment reduced TIL-MART-1 activation manifested by reduced CD137 and cytokine secretion and anti-PVRIG (CPA.7.21) could partially reverse this effect in combo treatment with DNAM-1 Ab. In TIL 209, IFNγ and TNF secretion levels were slightly elevated (˜10%) with anti DNAM-1, and an increase in IFNγ and TNF levels (˜40% and 30%, respectively) was observed when anti DNAM1 and anti PVRIG (CPA.7.021) were added to co-culture in combination. Collectively, our results suggest that PVRIG is a new co-inhibitory receptor for PVRL2.

### Example 15 Effect of Anti-PVRIG Antibody on Human Melanoma Specific Tils Function in Combination with Anti-Tigit and Anti-PD1 Antibodies

### Materials and Methods

[0633] TILs: Tumor-infiltrating lymphocytes (TILs) from three melanoma patients were used:
[0634] TIL-412-HLA-A2-Mart1 specific
[0635] TIL-F4-HLA-A2-gp100 specific
[0636] TIL-209-HLA-A2-gp100 specific

[0637] TILs were thawed in IMDM (BI, 01-058-1A) full medium supplemented with 10% human serum (Sigma, H3667)+1% Glutamax (Life technologies, 35050-038)+1% Na-Pyruvate (Biological Industries, 03-042-1B)+1% non-essential amino acids (Biological Industries, 01-340-1B)+1% Pen-Strep (Biological Industries, 03-031-1B)+300 U/ml of rhIL2 (Biolegend, 509129).

[0638] Tumor cell lines: Human melanoma cells Mel-624 express MART-1 and gp-100 antigens in the context of MHC-I haplotype HLA-A2. Cells were cultured in complete DMEM medium (Biological Industries, 01-055-1A) supplemented with 10% FBS (BI, 04-127-1A), 25 mM HEPES buffer (BI, 03-025-1B), 1% Glutamax (Life technologies, 35050-038), and 1% Pen-Strep (Biological Industries, 03-031-1B).

[0639] Co-culture of TILs with 624 melanoma cells in the presense of anti-PVRIG, anti-TIGIT and PD1 blocking antibodies: To assess the effect of anti-PVRIG antibody (CPA.7.021), anti-TIGIT (Clone 10A7) and anti-PD1 (mAb 1B8, Merck) on melanoma specific TIL activity, TILs (3×104 cells/well) were pre-incubated with tested antibodies or relevant isotype controls in mono-treatment (10 μg/mL) or in combination-treatment (final for each) prior to addition of 624 Melanoma target cells at 1:3 Effector:target ratio. Plate was incubated overnight (18 hr) in 37° C., 5% CO2.

[0640] Assessment of TILs activation: Culture supernatants were collected and analyzed for cytokine secretion by CBA kit (Cat #560484, BD).

[0641] In vitro monotherapy anti-PVRIG and combo-therapy of with anti-TIGIT and PD1 blocking antibodies: F4 TILs (gp100 specific) were cultured with Me1-624 cells in 1:3 E:T for 18 hr. Co-culture supernatant was collected and tested for presence of secreted cytokines. Treatment of anti-TIGIT or anti-PD1 did not affect IFNγ or TNF secretion levels. However, an increase in IFNγ and TNF levels was observed when anti TIGIT or anti-PD1 in combination with anti PVRIG were added to co-culture in combination (FIGS. 87A and 87B).

[0642] Treatment of anti-PVRIG, anti-TIGIT and PD1 alone did not affect IFNγ or TNF secretion levels from TILs co-culture with 624 Mels, however, an increase in IFNγ and TNF levels was observed when anti-TIGIT or anti-PD1 antibodies were added in combination with anti PVRIG (CPA.7.021). The presented data suggest that there is synergestic effect for combinatory therapy with anti-TIGIT or anti-PD1 antibodies.

### Example 16: Effect of Anti-PVRIG Antibodies on TCR Signaling Using Reporter Gene Assay

[0643] A reporter assay system for TCR signaling, such as the Jurkat-NFAT-Luc cell line, is used to test the effect of anti-PVRIG antibodies on TCR mediated signaling. This Jurkat cell line derivative expresses the luciferase reporter gene under the control of the NFAT response element. These cells are transfected with a vector encoding full length human PVRIG. As negative control, cells transfected with empty vector are used. Transfectants with vectors encoding for costimulatory or coinhibitory reference molecules, such as CD28 and PD-1, serve as positive control. Transfectants are stimulated by the addition of anti-human CD3 (e.g. OKT3) in the absence or presence of anti-PVRIG antibodies. Isotype control serves as negative control. Known functional antibodies against the reference molecules serve as positive controls. A functional agonistic crosslinking antibody is expected to show an inhibitory effect on the luciferase activity.

### Example 17 Effect of Anti-PVRIG Antibodies on T Cell Activation Using PVRL2-FC

[0644] A plate bound assay is used to test the effect of anti-PVRIG antibodies on T cell activation, proliferation and cytokine secretion. Purified human bulk T cells are stimulated using 1 μg/ml plate bound anti-human CD3 (e.g. OKT3) and 5 μg/ml PVRL2-Fc (recombinant fused protein composed of the ECD of PVRL2, the counterpart of PVRIG) or negative control. T cell activation is evaluated by expression of activation markers, e.g. CD137, or by cell division as evaluated by dilution of CFSE dye (T cells are labeled with CFSE prior to their stimulation). Cytokine production (e.g. IFNg, IL-2) is also assessed as additional readout of T cell activation. T cell subtype markers are used to distinguish specific effects on CD4 or CD8 T cells. The co-immobilized PVRL2-Fc could have a basal stimulatory effect on T cell activation, mediated through endogenous DNAM1—a known costimulatory counterpart receptor of PVRL2 on T cells. In the presence of antagonistic anti-PVRIG Abs, this stimulatory basal effect of PVRL2-Fc is expected to be further enhanced, due to their blocking of the inhibitory influence of endogenous PVRIG on T cell activation. Accordingly, agonistic anti-PVRIG Abs are expected to show inhibition of T cell activation.

### Example 18: Effect of Anti-PVRIG Antibodies on T Cell Activation Using PVRL2 Ectopic Expressing Cells

[0645] A cell based assay is used to test the effect of anti-PVRIG antibodies on T cell activation, proliferation and cytokine secretion. Purified human bulk or CD4 or CD8 T cells are stimulated upon co-culture with CHO stimulator cells (CHO cells expressing membrane-bound anti-CD3) ectopically expressing PVRL2 or empty vector. T cell activation is evaluated by expression of activation markers, e.g. CD137, or by cell division as evaluated by dilution of CF SE dye (T cells are labeled with CF SE prior to their stimulation). Cytokine production (e.g. IFNγ, IL-2) is also assessed as additional readout of T cell activation. T cell subtype markers are used to distinguish specific effects on CD4 or CD8 T cells. The PVRL2-expressing CHO stimulators are expected to have a basal stimulatory effect on T cell activation, mediated through endogenous DNAM1—a known costimulatory counterpart receptor of PVRL2 on T cells. In the presence of antagonistic anti-PVRIG Abs, this stimulatory basal effect of surface expressed PVRL2 is expected to be further enhanced, due to their blocking of the inhibitory influence of endogenous PVRIG on T cell activation. Accordingly, agonistic anti-PVRIG Abs are expected to show inhibition of T cell activation.

### Example 19 Effect of Anti-PVRIG Antibodies on T Cell Activation Using the SEB Assay

[0646] Anti-PVRIG antibodies are tested for their effect on T cell activity using blood cells from healthy volunteers and SEB (Staphylococcus enterotoxin B) superantigen to engage and activate all T cells expressing the Vβ3 and Vβ8 T cell receptor chain. Human PBMCs are cultured in 96-well round-bottom plates and pre-incubated for 30-60 min with the tested antibodies. SEB is then added at various concentrations ranging from 10 ng/mL to 10 μg/mL. Supernatants are collected after 2 to 4 days of culture and the amount of cytokine (e.g. IL-2, IFNγ) produced is quantified by ELISA or using standard CBA kit. SEB stimulates cytokine production by whole-blood cells in a dose dependent manner. The effect of anti-PVRIG mAbs on cytokine production is tested at several Ab doses. Blocking anti-PVRIG mAbs are expected to enhance IL-2 production over control IgG. In addition to IL-2, the effect of the Abs on the levels of additional cytokines such as TNFα, IL-17, IL-7, IL-6 and IFNγ can be tested in this assay using a CBA kit.

### Example 20: Effect of Anti-PVRIG Antibodies in Ag-Specific Assays

[0647] An assay that is used to profile the functional effect of anti-human PVRIG antibodies on Ag specific stimulation of pre-existing memory T cells in healthy donor blood is the tetanus toxoid (TT) assay. To this end, freshly prepared PBMC (2×10⁵ cells) are plated in 96 well round-bottom plates in complete RPMI 1640 medium (containing 5% heat inactivated human serum), pre-incubated with tested antibodies at varying concentration and stimulated with TT (Astarte Biologics) at a concentration of 100 ng/mL The cells are incubated for 3-7 days at 37° C., after which supernatants are harvested. Cytokine concentrations (e.g. IL-2, IFN-γ) are determined by ELISA and/or CBA kit. Blocking anti-PVRIG Abs are expected to enhance T cell proliferation and cytokine production compared to that obtained with TT antigen alone.

[0648] Similarly to the method described above, which uses TT to stimulate human memory T cells, we can test the effect of anti-PVRIG Abs on T cell activation upon recall responses to additional antigens such as CMV, EBV, influenza HIV, mumps, and TB, using a similar experimental setup as described above. This can also be used to test the effect of anti-PVRIG antibodies on stimulation of naïve cells using neo-antigens such as KLH.

[0649] In addition, the effect of anti-PVRIG Abs is tested on the antigen specific responses of tetramer-sorted Ag-specific CD8 T cells from peripheral blood of patients suffering from viral infections such as HCV and HIV. Tetramer sorted CD8 T cells are co-cultured with peptide-loaded autologous PBMCs for 5 days. Proliferation of CD8 Ag-specific T cells and secretion of cytokines (e.g. IFNγ, IL2, TNF-α) are evaluated. We expect anti-PVRIG antibodies to enhance proliferation and cytokine production, compared to antigen alone.

### Example 21: Binding and Functional Analysis of Hybridoma-Derived Antibodies Against PVRIG

[0650] This example shows the characterization of binding of hybridoma-derived antibodies (the CHA antibodies) to human and cynomolgus PVRIG protein in cell lines and primary leukocytes, as well as the characterization of the capacity of hybridoma-derived antibodies to block the interaction between PVRIG and PVRL2.

[0651] Protocols

[0652] FACS analysis of hPVRIG over-expressing cells: The following cell lines were used to assess the specificity of anti-human PVRIG antibodies: HEK parental and HEK hPVRIG over-expressing cells. These cells were cultured in DMEM (Gibco)+10% fetal calf serum (Gibco)+glutamax (Gibco). For the HEK hPVRIG over-expressing cells, 0.5 μg/ml puromycin (Gibco) was also added to the media for positive selection. For FACS analysis, all cell lines were harvested in log phase growth and 50,000-100,000 cells per well were seeded in 96 well plates. Anti-human PVRIG antibodies (mIgG1 or mIgG2a) and their respective controls were added in single point dilutions (5 μg/ml), or as an 8 point titration series starting at 10 μg/ml on ice for 30 mins-1 hr. The titration series were conducted as either 1:3 or 1:3.3 fold serial dilutions. Data was acquired using a FACS Canto II (BD Biosciences) or IntelliCyt (IntelliCyt Corporation) and analyzed using FlowJo (Treestar) and Prism (Graphpad) software.

[0653] FACS analysis of human cell lines for hPVRIG: The following cell lines were used to assess the expression and specificity of anti-human PVRIG antibodies: Jurkat and HepG2. Jurkat cells were cultured in RPMI media+10% fetal calf serum, glutamax, non-essential amino acids (Gibco), sodium pyruvate (Gibco), and penicillin/streptomycin (Gibco). HepG2 cells were cultured in DMEM+10% fetal calf serum+glutamax. For FACS analysis, all cell lines were harvested in log phase growth and 50,000-100,000 cells per well were seeded in 96 well plates. Anti-human PVRIG antibodies (mIgG1 or mIgG2a) and their respective controls were added in single point dilutions (5 μg/ml), or as an 8 point titration series starting at 10 μg/ml on ice for 30 mins-1 hr. The titration series were conducted as either 1:3 or 1:3.3 fold serial dilutions. Data was acquired using a FACS Canto II or IntelliCyte and analyzed using FlowJo and Prism software.

[0654] FACS analysis of naïve human primary leukocytes for hPVRIG: Primary leukocytes were obtained by Ficoll (GE Healthcare) gradient isolation of peripheral blood (Stanford Blood Bank). Leukocytes as isolated peripheral blood mononuclear cells (PBMC) were frozen down in liquid nitrogen at a density between 1×10⁷ and 5×10⁷ cells/ml in a 10% DMSO (Sigma), 90% fetal calf serum mixture. To assess protein expression of PVRIG on PBMC, antibody cocktails towards major immune subsets were designed that included human anti-PVRIG antibodies. Anti-human PVRIG antibodies (mIgG1 or mIgG2a) and their respective controls were added in single point dilutions (5 μg/ml), or in some cases, as a 4 point titration series starting at 10 μg/ml on ice for 30 mins-1 hr.

[0655] Briefly, antibody cocktail mixtures were added to resuscitated PBMC that were seeded at 5×10⁵-1×10⁶ cells/well upon prior Fc receptor blockade and live/dead staining (Aqua Live/Dead, Life Technologies). Antibody cocktails were incubated with PBMC for 30 mins-1 hr on ice. PBMC were then washed and data was acquired by FACS using a FACS Canto II. Data was analysed using FlowJo and Prism software. Immune subsets that were analysed include CD56 dim NK cells, CD56 bright NK cells, CD4+ T cells, CD8+ T cells, non-conventional T cells (e.g. NKT cells and γδ T cells), B cells, and monocytes.

[0656] FACS analysis of cynomolgus PVRIG engineered over-expressing cells: The following cell lines were used to assess the cross-reactivity of anti-human PVRIG antibodies with cynomolgus PVRIG (cPVRIG): expi parental and expi cPVRIG over-expressing cells. These cells were cultured in DMEM+10% fetal calf serum+glutamax. expi cPVRIG transient over-expressing cells were generated by electroporating cPVRIG DNA into parental expi cells using the Neon transfection system. For FACS analysis, expi cPVRIG cells were used between 1-3 days post transfection. Parental expi cells were harvested from log growth phase. 50,000-100,000 cells of per well of each type were seeded in 96 well plates. Anti-human PVRIG antibodies (mIgG1 or mIgG2a) and their respective controls were added in single point dilutions (5 μg/ml), or as an 8 point titration series starting at 10 μg/ml on ice for mins-1 hr. The titration series were conducted as either 1:3 or 1:3.3 fold serial dilutions. Data was acquired using a FACS Canto II or IntelliCyte and analyzed using FlowJo and Prism software.

[0657] FACS analysis of naïve primary cynomolgus monkey leukocytes: Primary cynomolgus monkey (cyno) leukocytes were obtained from fresh blood which was drawn no longer than 24 hours prior to expression analysis. Blood was sourced from Bioreclamation. To assess protein expression of PVRIG on cyno PBMC, antibody cocktails towards major immune subsets were designed that included human anti-PVRIG antibodies. Anti-human PVRIG antibodies (mIgG1 or mIgG2a) and their respective controls were added in single point dilutions (5 μg/ml), or as an 8 point titration series starting at 10 μg/ml on ice for 30 mins-1 hr.

[0658] Briefly, antibody cocktail mixtures were added to PBMC that were seeded at 5×10⁵-1×10⁶ cells/well upon prior Fc receptor blockade and live/dead staining. Antibody cocktails were incubated with PBMC for 30 mins-1 hr on ice. PBMC were then washed and data was acquired by FACS using a FACS Canto II. Data was analysed using Prism software. Immune subsets that were analysed include CD16+ lymphocytes, CD14+/CD56+ monocytes/myeloid cells, and CD3+ T cells.

[0659] Cellular-based competition assays: The ability of PVRIG antibodies to inhibit the interaction of PVRIG with its ligand PVRL2 was assessed in a cellular competition assay. In this assay, the ligand PVRL2 is endogenously expressed on un-manipulated HEK cells and soluble Fc-tagged PVRIG (manufactured on demand by Genscript) is added. In this case, the ability of PVRIG antibodies to block soluble PVRIG binding to HEK cells were assessed through the concomitant addition of 33 nM of soluble PVRIG protein and PVRIG antibodies (0.066-66 nM) to 100,000 HEK cells and incubated for 1 hour on ice. The extent of PVRIG Fc binding was detected by addition of anti-human Fc Alexa 647 (Jackson Laboratories) for minutes on ice. Cells were washed twice in PBS for acquisition using a FACS Canto II. Data was analyzed using FlowJo (Treestar), Excel (Microsoft) and Prism (GraphPad).

[0660] Results

[0661] Hybridoma PVRIG antibodies recognize PVRIG on overexpressing cells: To screen for antibodies that were specific for PVRIG, we assessed the ability of antibodies that were generated from two hybridoma campaigns to bind HEK cell lines that were engineered to overexpress human PVRIG. The majority of antibodies from these campaigns bound to the HEK hPVRIG cells, albeit with varying affinity. Furthermore, the majority of these antibodies also showed low background binding to HEK parental cell lines indicating high specificity towards PVRIG. FIG. 77 shows one example of the specificity of the PVRIG antibodies. A summary of all binding characteristics of the antibodies towards HEK hPVRIG cells relative to control that were generated in the hybridoma campaigns are displayed in FIGS. 79A and 79B.

[0662] PVRIG antibodies recognize PVRIG protein on naïve NK and T cells: The populations which displayed the highest level of PVRIG on naïve PBMC subsets were NK and CD8 T cells, and the absolute level of expression between these two cell subsets was similar (gMFI). CD4 T cells showed lower levels of PVRIG, while B cells and monocytes had very low/no detectable expression. A summary of expression on naïve NK cells and CD8 T cells as detected by the antibodies is shown in FIG. 91. Other minor subsets also displayed PVRIG expression and included non-conventional T cells such as NKT cells and γδ T cells. The expression pattern on PBMC subsets was very similar across all donors sourced and analyzed.

[0663] PVRIG is detected on Jurkat cell lines by hybridoma-derived PVRIG antibodies: In addition to screening PBMC for PVRIG protein expression, we wanted to understand whether it was also expressed on cancer cell lines. We chose to screen our antibodies on Jurkat cells given their high expression of PVRIG RNA. We also chose HepG2 as a negative control cell line to further validate the specificity of our antibodies. Most of the hybridoma-derived antibodies did detect PVRIG protein expression on Jurkat cells (FIG. 79), but not the HepG2 cells (data not shown). An example of PVRIG detection on Jurkat is shown in FIG. 78 with a representative antibody, CHA.7.518.

[0664] Cellular-based biochemical assays: Upon screening our 29 hybridoma antibodies in the cellular biochemical assays, we found that there were 20 clear blockers and 9 non-blockers of the PVRIG-PVRL2 interaction. All of the blocking antibodies were able to inhibit the interaction of PVRIG Fc with HEK cells by at least 50%, with most of these antibodies completely abolishing PVRIG Fc binding. The IC₅₀ values associated with those antibodies that did show blocking capacity are reported in FIG. 92. The majority of IC₅₀ values were between 20-60 nM.

### Summary and Conclusions

[0665] Using a hybridoma platform, we have been able to successfully generate monoclonal antibodies towards the human PVRIG antigen. Using engineered over-expressing cells as well as a suite of cancer cell lines, we showed that our antibodies are highly specific to the PVRIG antigen, and are able to detect protein expression which correlated with RNA expression. Upon analysis of human PBMC subsets, we showed that the PVRIG protein is most highly expressed on NK and T cells, with low/negative expression on B cells and myeloid cells. We also showed that a proportion of these antibodies are cross-reactive with the cynomolgus monkey (cyno) PVRIG antigen through assessing their binding to over-expressing cells. Furthermore, the expression pattern on cyno PBMC is similar to human PBMC. Lastly, we were able to show through a FACS-based competition assay, that a proportion of our hybridoma antibodies are able to inhibit the interaction of PVRIG with its ligand, PVRL2. The antibodies which showed the best characteristics regarding all the aforementioned data were CHA-7-518, CHA-7-524, CHA-7-530, and CHA-7-538.

### Example 22: Effect of CHA Anti-PVRIG Antibodies in the MLR Assay

[0666] An assay used to profile the functional effect of anti-human PVRIG antibodies on allo-antigen responses is proliferation of Human CD8+ T Cells in a Mixed Lymphocyte Reaction (MLR) assay. As is known in the art, MLR is an ex vivo cellular immune assay that provides an in vitro correlation of T cell function.

[0667] Anti-PVRIG antibodies are expected to enhance proliferation of human CD4 and CD8 T cells in response to cells from an MHC-mismatched donor. Human T cells are enriched from whole blood of one donor (e.g. donor A) by using Human T cell RosetteSep® (StemCell Technologies) as per manufacturer's instructions. After separation, cells are fluorescently labeled with CFSE dye (Molecular Probes). To serve as allogeneic antigen presenting cells (APCs), mononuclear cells are first isolated from whole blood from a WIC-mismatched donor (e.g. donor B) and then depleted of CD3+ T cells. APCs are then irradiated with 2500 rads in a cesium irradiator.

[0668] In general, an MLR assay is done as follows. HumanT cells and allogeneic 150,000 APCs are co-cultured in a 96-well flat-bottom plate with 150,000 CD8+ T cells and APCs for 5 days with anti-PVRIG antibodies at different concentrations. On day 5, cells are harvested, washed and stained with anti-CD8-biotin followed by streptavidin-PerCp. Samples are run by FACS to assess the degree of proliferation as depicted by CFSE dilution. Functional blocking anti-PVRIG antibodies are expected to enhance T cells proliferation and cytokine secretion in response to cells from a MHC-mismatched donor.

[0669] An MLR assay was used to characterize the biochemical effect of the CHA antibodies of the invention on resting and activated human T cells, and to characterize the capacity of hybridoma-derived antibodies to modulate T cell proliferation in an MLR setting

[0670] Protocols

[0671] Mixed Lymphocyte Reaction (MLR): A mixed lymphocyte reaction was established by co-culturing dendritic cells (DCs) and T cells derived from distinct donors in an allogeneic setting. DCs were generated by culturing purified monocytes with 100 ng/ml GM-CSF (R&D systems) and 100 ng/ml IL-4 (R&D systems) for 7 days. After 7 days, purified CFSE-labelled CD3 T cells were combined with DCs at a 10:1 ratio and were cultured in X vivo-20 serum free media (Lonza) for 5 days. In some conditions, unconjugated anti-PVRIG antibodies or isotype control antibodies were added to the plates at 10 μg/ml. Three MLR assay permutations were set up, where DCs from one donor were co-cultured with CD3 T cells from 3 separate allogeneic donors. All blood products were sourced from Stanford Blood Bank.

[0672] Expression and functional analysis: After the 5 day MLR culture, the level and extent of T cell activation and proliferation was assessed by CFSE dilution and expression of activation markers such as CD25 and PD-1. In-house anti-PVRIG antibodies from both phage and hybridoma campaigns were used to assess the expression of PVRIG. Expression of the PVRIG ligand, PVRL2, was also assessed in a kinetic fashion on DC. All data was acquired using flow cytometry and data analysis was performed using FlowJo (Treestar) and Prism (Graphpad) software.

[0673] FACS-based epitope analysis: As we tested an array of antibodies in the MLR, we were interested in determining whether these antibodies could be epitope ‘binned’ based on FACS-based binding, and whether this ‘binning’ would correlate to changes in T cell activation and proliferation in the assay. To do this, T cells harvested from the assay were pre-incubated with unconjugated PVRIG antibodies, and then counter-stained with a conjugated PVRIG antibody of a different clone. The extent to which the conjugated PVRIG antibody gave a signal on T cells indicated the extent to which this antibody had to compete for PVRIG binding on T cells with the unconjugated antibody. A negative or low signal would indicate that there is high competition, indicating the two antibodies are in the same epitope ‘bin’. A high signal would indicate low or no competition and thus the antibodies would be considered to be in different ‘bins’.

[0674] Results

[0675] Expression of PVRL2 on monocyte-derived DC: To determine whether PVRL2 would be expressed on DC for the MLR assay, DC were generated from monocytes, and PVRL2 expression was assessed in a kinetic fashion at daily intervals after addition of GM-CSF and IL-4. As indicated in FIG. 72, PVRL2 expression increased from Day 0 until Day 5 where expression peaked. At Day 6, expression decreased slightly compared to Day 5. At Day 7, expression was similar to Day 6 indicating stabilization of PVRL2 expression at these time points. Thus, DC expressed PVRL2 at the appropriate time point for use in the MLR assay.

[0676] Expression of PVRIG on T cells after MLR culture: Many T cell receptors than modulate function in the MLR are expressed on proliferating T cells. Thus, we wanted to determine whether PVRIG is also expressed. We analysed proliferating T cells at Day 5 post MLR co-culture initiation and were characterized by their dilution of CFSE (i.e. CFSE low). As shown in FIGS. 73A-73B and FIGS. 74A-74B, relative to isotype control (mIgG1), PVRIG was expressed on CFSE low cells as determined by multiple PVRIG antibodies on both CD4 and CD8 T cells across three donors analysed. FACS plots are shown in FIGS. 73A-73B to indicate PVRIG on CF SE low cells, and bar graphs in FIGS. 74A-74B indicate the level of expression of PVRIG relative to mIgG1.

[0677] PVRIG antibodies enhance T cell proliferation: Having shown that PVRIG expression is expressed on proliferating T cells in the MLR, we wanted to determine whether treatment with PVRIG antibodies could affect levels of T cell proliferation. As shown in FIG. 4, addition of PVRIG antibodies into the MLR assay was able to increase the percentage of CF SE low cells across all the hybridoma antibodies tested compared to control. This was observed across all donors analysed.

[0678] PVRIG antibodies bind to multiple epitopes on PVRIG: To compare the PVRIG antibodies for their ability to bind different epitopes on PVRIG, we performed a competition experiment where T cells from the MLR were cultured with unlabeled anti-PVRIG antibodies derived from our hybridoma campaigns for 5 days. T cells were then harvested at day 5 and counter-stained with a conjugated anti-PVRIG antibody that was derived from our phage campaign (CPA.7.021). As shown in FIG. 76, complete or near complete reduction of CPA.7.021 binding was observed in conditions that contained CHA.7.516-M1, CHA.7.518-M1, CHA.7.524-M1, CHA.7.530-M1, and CHA.7.538-M1 when compared to background fluorescence levels, suggesting that these antibodies may overlap in epitope recognition. Partial reduction in CPA.7.021 binding was observed with CHA.7.537-M1, CHA.7.528-M1, and CHA.7.548-M1, suggesting partial overlap in epitope recognition. No reduction in CPA.7.021 binding was observed in cells pre-cultured with CHA.7.543-M1 suggesting an absence of epitope recognition. Collectively, this data indicates that the PVRIG antibodies from our campaigns, when assessed relative to CPA.7.021, could recognize at least 3 different epitopes on PVRIG.

### Conclusions

[0679] We characterized our PVRIG antibodies for their ability to bind to proliferating and resting T cells, as well as their functional activity in a MLR. Binding of multiple PVRIG antibodies was detected on proliferating T cells and was higher on proliferating T cells as compared to resting, especially the CD8+ subset. This data demonstrates that PVRIG expression is increased upon T cell activation. Furthermore, several PVRIG antibodies increased T cell proliferation as compared to mIgG1 isotype indicating that they can also modulate T cell function. As above, these antibodies all have ability to block PVRIG with its ligand, PVRL2. Based on this, we conclude that by blocking the PVRIG-PVRL2 interaction, these antibodies lead to an increase in T cell activation and proliferation, which is a hallmark indication of a desired effect for an immune checkpoint inhibitor that would be used to treat cancer. Lastly, we performed competition experiments comparing the binding of multiple hybridoma-derived PVRIG antibodies to activated T cells, relative to a phage-derived antibody. From this series of experiments, we provide evidence for epitope diversity of our phage and hybridoma-derived antibodies.

### Example 23: Effect of Anti-PVRIG Antibodies on T Cell Activation Upon Combination with Immune Checkpoint Blockade

[0680] The combination of PVRIG blockade with blocking Abs of a known immune checkpoint (e.g. PD1, PDL-1 or TIGIT), is expected to further enhance the stimulatory effect on T cell activation in the assays depicted above.

### Example 24: Functional Analysis of PVRIG Antibodies

[0681] The human PVRIG antibodies of the invention were characterized for the ability to inhibit the interaction of PVRIG with its ligand PVRL2, and their ability to modulate effector lymphocyte function in primary cell-based assays.

[0682] Protocols

[0683] Cellular-Based Biochemical Assays

[0684] The ability of PVRIG antibodies to inhibit the interaction of PVRIG with its ligand PVRL2 was assessed in a cellular biochemical assay format in two orientations.

[0685] In the first orientation, the ligand PVRL2 is endogenously expressed on un-manipulated HEK cells and soluble biotinylated Fc-tagged PVRIG (manufactured on demand by Genscript) is added. In this case, the ability of PVRIG antibodies to block soluble PVRIG binding to HEK cells were assessed through two permutations. In the first permutation, various concentrations of PVRIG antibodies (range 0.066-66 nM) were pre-incubated with 33 nM of soluble PVRIG in phosphate buffered saline (PBS, Gibco) for 30 minutes on ice. This complex was subsequently added to 100,000 HEK cells in and incubated for a further 1 hour on ice. After 1 hour, HEK cells were washed twice in PBS and the extent of soluble PVRIG bound to HEK cells was detected by addition of streptavidin conjugated to Alexa 647 (Jackson Laboratories) for 30 minutes on ice. HEK cells were washed twice in PBS, and resuspended in 100 ul of PBS for acquisition on the FACS Canto II (BD Biosciences). Data was analysed using FlowJo (Treestar) and Prism (Graphpad) software. In the second permutation, 33 nM of soluble PVRIG protein and PVRIG antibodies (0.066-66 nM) were added concomitantly to 100,000 HEK cells and incubated for 1 hour on ice. Subsequent steps to analysis for this permutation are equivalent to the first permutation.

[0686] In the second orientation, HEK cells were engineered to over-express PVRIG and soluble biotinylated Fc-tagged PVRL2 (CD Biosciences) was added. In this case, various concentrations of PVRIG antibodies (range 0-200 nM) with 160 nM soluble PVRL2 were added concomitantly to 100,000 HEK hPVRIG or parental HEK cells, and incubated in PBS+1% BSA+0.1% sodium azide (FACS buffer) for 1 hr on ice. Soluble PVRL2 binding was detected by addition of streptavidin Alexa 647 in FACS buffer for 30 minutes on ice. Cells were washed twice in FACS buffer, and re-suspended in 50 ul of PBS for acquisition on the Intellicyt HTFC (Intellicyt). Data was analyzed using FlowJo (Treestar), Excel (Microsoft) and Prism (GraphPad).

[0687] Primary NK Cell Assay

[0688] The PBMC subset with the most robust expression profile for PVRIG was on NK cells. As such, we designed an NK cell-based co-culture assay with PVRL2-expressing tumor cells to determine whether our antibodies could modulate NK cell-mediated cytotoxicity towards these targets. The targets we chose were the acute B cell lymphocytic leukemia cell line, Reh (ATCC cell bank), and the acute myeloid leukemia cell line, MOLM-13 (DSMZ cell bank). Reh and MOLM-13 cells were grown in RPMI media (Gibco)+20% fetal calf serum (Gibco), glutamax (Gibco), penicillin/streptomycin (Gibco), non-essential amino acids (Gibco), sodium pyruvate (Gibco), HEPES (Gibco), and beta-mercaptoethanol (Gibco).

[0689] Two days prior to the co-culture assay, primary NK cells were isolated using the human NK cell isolation kit (Miltenyi Biotec) and cultured in RPMI media+20% fetal calf serum, glutamax, penicillin/streptomycin, non-essential amino acids, sodium pyruvate, HEPES, beta-mercaptoethanol, and 250 U/ml IL-2 (R&D systems). On the day of the assay NK cells were harvested, enumerated and pre-incubated with PVRIG antibodies for 15-30 minutes at room temperature. During this incubation, target cells were harvested from culture, labelled with Calcein AM (Life Technologies) for 30 minutes at 37° c., washed in media, and enumerated for the assay. NK cell-mediated cytotoxicity assays were set up where a constant number of target cells (50,000) were co-cultured with increasing concentrations of NK cells pre-incubated with 5 μg/ml of PVRIG antibodies (thus altering the NK cell to target ratio). Alternatively, a fixed NK cell to target ratio was used in the assay, but NK cells were pre-incubated with altering concentrations of PVRIG antibody (range 3.9 ng/ml-5 μg/ml) in a dose titration. Upon addition of the NK cells and targets, plates were pulse spun at 1,400 rpm for 1 minute and placed at 37° c. in a 5% CO₂ atmosphere for 4 hours. After 4 hours, plates were spun at 1,400 rpm for 4 minutes, and 80 ul of supernatant was harvested to quantitate the release of Calcein AM from the target cells. The quantity of Calcein AM released from targets was assessed by a Spectramax Gemini XS fluorometer (Molecular Devices). As controls for Calcein AM release, total and spontaneous release was assessed by exposing target cells to 70% ethanol or media only for the duration of the assay. Levels of killing (as a percentage) by NK cells were calculated using the following formula:

(Sample release−spontaneous release)/(total release−spontaneous release)*100

[0690] In addition to PVRIG antibodies, in some cases, other antibodies towards NK cell receptors such as TIGIT (Genentech, clone 10A7, Patent number: WO2009126688 A2) and DNAM-1 (Biolegend, clone 11A8) were also added as comparators.

[0691] Results

[0692] Cellular-based biochemical assays: Upon screening a panel of our PVRIG antibodies in the cellular biochemical assays, we found that there was variable levels of inhibition across the antibodies tested, and the level of inhibition was dependent on the permutation and orientation of the assay (FIG. 98). Four antibodies are specifically shown in FIGS. 93A-93C to illustrate these points. The orientation and permutation of the assay which gave the most robust inhibitory effect relative to control, was when soluble PVRIG pre-incubated with PVRIG antibodies was added to HEK cells (FIG. 93a). In this permutation, CPA.7.021 showed the best absolute blocking capacity compared to the other three antibodies (CPA.7.002, CPA.7.005, and CPA.7.050). Despite the differences in level of blocking, all antibodies in this permutation showed similar IC₅₀ values which were in the low nanomolar range, and the blocking capacity plateaued at higher concentrations.

[0693] When the absolute level of inhibition invoked by the four PVRIG antibodies was then measured when soluble PVRIG and PVRIG antibodies were concomitantly added to HEK cells, more variability of blocking in the assay was observed (FIG. 93b). CPA.7.021 remained the best blocking antibody. However, CPA.7.002 and CPA.7.005 showed markedly less ability to inhibit soluble PVRIG binding to HEK cells relative to the control antibody. CPA.7.050 showed an intermediate level of blocking as compared to CPA.7.021, CPA.7.002, and CPA.7.005. This difference in absolute level of inhibition also corresponded to differences in the IC₅₀ values of each antibody. CPA.7.021 and CPA.7.050 again showed low nanomolar IC₅₀ values, although they were both higher than in the first permutation of the assay. In contrast, the IC₅₀ values of CPA.7.002 and CPA.7.005 increased substantially, CPA.7.002 by approximately 20-fold, and CPA.7.005 by approximately 30-fold. This data indicates that how the antibody has to compete for PVRIG binding with its cognate ligand, will indicate the potency with which the antibody can block this interaction.

[0694] When the orientation of the biochemical assay was reversed (i.e. PVRL2Fc was assessed to bind to HEK hPVRIG cells), the ability of the four PVRIG antibodies to block PVRL2 Fc interaction was variable (FIG. 93c). Consistent with the biochemical assays which used HEK cells as targets (FIG. 93a-b), CPA.7.021 and CPA.7.050 inhibited PVRL2 Fc binding to HEK hPVRIG cells, and their ability to block the binding was similar. Surprisingly however, we saw enhancement of PVRL2 Fc binding in the presence of CPA.7.002 and CPA.7.005 antibodies which we did not observe when HEK cells were used as targets.

[0695] NK cell cytotoxicity assay with Reh cells: The first target we investigated in the NK cell cytotoxicity assay was the Reh line. Reh was initially selected as it showed robust levels of PVRL2 by flow cytometry, but a low frequency of other activating ligands such as NKG2D ligands, and low expression of PVR (FIGS. 94A-94H). Traditional NK cell targets were not used, such as K562, due to their expression of a high frequency of NKG2D ligands, and high expression of PVR, which may mask a functional effect of the PVRIG antibodies. Importantly, Reh cells did not express any NK cell receptors known to interact with PVRL2 and PVR such as TIGIT, DNAM-1, and PVRIG.

[0696] Upon screening our panel of PVRIG antibodies in this assay, we found four antibodies that were able to modulate NK cell-mediated cytotoxicity (FIG. 99). These four antibodies were those that were discussed in the biochemical assay results section-CPA.7.002, CPA.7.005, CPA.7.021, and CPA.7.050. In all cases, addition of these antibodies enhanced NK cell-mediated cytotoxicity against Reh cells (FIGS. 95a-95c). Addition of CPA.7.002 and CPA.7.005 enhanced cytotoxicity most robustly (FIGS. 95a-95b), followed by CPA.7.021 and CPA.7.050 which showed similar levels of enhancement (FIG. 95c). FIG. 95d shows a concentration-dependent analysis of enhancement of NK cell-mediated cytotoxicity by CPA.7.002 and CPA.7.021. Blocking antibodies towards receptors that have been reported to also bind PVRL2 such as TIGIT and DNAM-1 were added to the assay with Reh cells as comparators. As shown in FIGS. 95e-95f, the addition of TIGIT and DNAM-1 antibodies did not show functional effects in this assay.

[0697] NK cell assay with MOLM-13 cells: To assess whether PVRIG antibodies were able to modulate NK cell-mediated cytotoxicity against a second target, MOLM-13 cells were utilized. MOLM-13 also express PVRL2 analogous to Reh cells, but also have robust expression of PVR (FIG. 94). Like the Reh cells, MOLM-13 did not express any NK cell receptors. Utilization of this cell line, in addition to Reh cells, would indicate whether PVRIG antibodies can modulate NK cell-mediated cytotoxicity in the context of different receptor-ligand interactions, particularly when PVR is expressed.

[0698] Upon screening our PVRIG antibodies in this assay, we found that the functional effect of CPA.7.021 was diminished and did not show significant enhancement of NK cell-mediated cytotoxicity above control levels (FIG. 97a). In contrast, CPA.7.002 and CPA.7.005 were able to enhance NK cell-mediated cytotoxicity in this assay (FIG. 97a). Using a comparator antibody, blockade of TIGIT did not show functional effects in this assay when compared to control (FIG. 97b).

### Summary and Conclusions

[0699] Using our antibody phage platform, we generated a panel of antibodies against the human PVRIG antigen that showed an ability to block the interaction of PVRIG with its ligand PVRL2, and enhance NK cell-mediated cytotoxicity against two hematological cell lines. The ability of the PVRIG antibodies to inhibit PVRIG and PVRL2 interaction was influenced by the orientation of the assay as well as pre-incubation steps, representative of potential antibody dynamics with PVRIG in physiological settings such as cancer. Four antibodies showed an ability to enhance NK cell-mediated cytotoxicity against the Reh cell line, but only two antibodies showed an ability to enhance cytotoxicity against MOLM-13 cells. This difference may be attributed to the alternate receptor-ligand interactions involved in NK cell-mediated recognition of each cell line, and/or differential properties of the antibodies and their potency in modulating the function of PVRIG.

### Example 25: Effect of Anti-PVRIG Antibodies on GD T Cell Activation Using PVRL2 Ectopic or Naturally Expressing Cells

[0700] A cell based assay is used to test the effect of anti-PVRIG antibodies on gamma delta T cell activation, proliferation and cytokine secretion. Purified human gamma delta T cells are activated with HMBPP or IPP and co-cultured with target cells (e.g. REH, MOLM-13) that naturally express PVRL2 or with target cells ectopically expressing PVRL2 or empty vector (e.g. CHO, Raji, 721.221). Gamma delta T cell function is assessed by examining cytokine production (e.g. IFN-γ, IL-17) in cultured supernatants or cytotoxic activity on the target cells. PVLR2 expression is expected to have a basal stimulatory effect on gamma delta T cell activation, mediated through endogenous DNAM1—a known costimulatory counterpart receptor of PVRL2 on gamma delta T cells. In the presence of antagonistic anti-PVRIG Abs, cytokine production or cytotoxic activity is expected to be further enhanced, due to their blocking of the inhibitory function of endogenous PVRIG on gamma delta T cell activation. Accordingly, agonistic anti-PVRIG Abs are expected to show inhibition of gamma delta T cell activation.

### Example 26: Effect of Proteins on Human T Cells Activated Using Anti-CD3 and Anti-CD28 in the Presence of Autologous PBMCS

### Materials and Methods

[0701] In these experiments the effects of PVRIG on human T cells which were activated using anti-CD3 and anti-CD28 in the presence of autologous PBMCS is evaluated. Conversely, this assay can also be used to assay the effects of anti-PVRIG antibodies on T cell activation.

[0702] PVRIG hECD-hIg fusion protein (FIG. 92BA), composed of the ECD of human PVRIG fused to the Fc of human IgG1 bearing C220, C226 and C229 to S mutations at the hinge, was produced at GenScript (China) by transient transfection in CHO-3E7 cells which were cultured for 6 days, followed by protein A purification of cell harvest. The final product was formulated in PBS pH 7.2. Expression vector used was Mammalian Expression Vector pTT5, in which PVRIG gene is driven by CMV promoter.

[0703] CD4+ Human T cell Isolation Kit II is purchased from Miltenyi (Cat. #130-094-131). hIgG1 control (Synagis®) is obtained from Medimmune Inc. Anti-human CD3 Ab (OKT3, Cat #16-0037) and anti-human CD28 Ab (clone CD28. 2; Cat #16-0289) are purchased from eBioscience. Dynabeads M-450 Epoxy (Cat. #140. 11) are purchased from Invitrogen. Buffy coats of human blood are obtained from LifeSource. Ficoll-Paque Plus (Cat. #17-1440-02), is purchased from GE HealthCare.

[0704] Isolation of PBMCs from buffy coats using Ficoll separation: Total PBMCs are suspended in Ex-Vivo 20 medium, and irradiated at 3000rad. Naïve CD4+ T cells are isolated from buffy coats of three healthy human donors' blood using CD4+ Human T cell Isolation Kit II (Miltenyi) according to manufacturer's instructions and co-cultured with irradiated autologous PBMCs at a ratio of 1:1 (1. 5×10⁵ T cells with 1.5×10⁵ irradiated PBMCs per well). The cultures are activated with anti-CD3 (0.5 μg/ml) and anti-CD28 (0.5 μg/ml) antibodies. Either an anti-PVRIG antibody or a PVRIG ECD protein are added to the culture at the indicated concentrations. After 24 hr in culture, cells are pulsed with H3-thymidine. Cells are harvested after 72 hours in culture.

[0705] For the ECD experiment, the results are expected to cause a dose dependent inhibition of T cell proliferation and/or activation, supporting the therapeutic potential of immunoinhibitory PVRIG based therapeutic agents (e.g. PVRIG polypeptides or PVRIG fusion proteins according to at least some embodiments of the invention) for treating T cell-driven autoimmune diseases, such as rheumatoid arthritis, multiple sclerosis, psoriasis and inflammatory bowel disease, as well as for treating other immune related diseases and/or for reducing the undesirable immune activation that follows gene or cell therapy. Essentially, immunoinhibitory PVRIG proteins that agonize PVRIG should prevent or reduce the activation of T cells and the production of proinflammatory cytokines involved in the disease pathology of such conditions.

[0706] In addition, these results are also expected to support a therapeutic potential of immunostimulatory anti-PVRIG antibodies that reduce the inhibitory activity of PVRIG for treating conditions which will benefit from enhanced immune responses such as immunotherapy of cancer, infectious diseases, particularly chronic infections and sepsis. Essentially, immunostimulatory anti=PVRIG antibodies will promote the activation of T cells and elicit the production of proinflammatory cytokines thereby promoting the depletion of cancerous or infected cells or infectious agents.

### Example 27: Inhibition of T Cell Activation Assay

[0707] In these experiments the effects of PVRIG ECDs or anti-PVRIG antibodies on T cell activation in a bead assay.

### Materials & Methods

[0708] Isolation of human T Cells: Buffy coats are obtained from Stanford Blood Bank from healthy human donors. CD3+ T cells are isolated from buffy coats using RosetteSep kit (StemCell Technologies) following manufacturer's instructions. Cells are analyzed with anti-CD45 and anti-CD3 by flow cytometry to evaluate the % of CD3+ cells obtained. Viability is evaluated after thawing prior to the assay.

[0709] Bead Coating and QC: Tosyl activated beads (Invitrogen, Cat #14013) at 500×10⁶/ml are coated with anti-CD3 mAb and either PVRIG ECD proteins or anti-PVRIG antibodies in a two-step protocol: with 50 μg/ml human anti-CD3 clone UTCH1 (R&D systems, Cat #mab 100) in sodium phosphate buffer at 37° C. overnight, followed with 0-320 μg/ml of either PVRIG ECD proteins or anti-PVRIG antibodies for another overnight incubation at 37° C.

[0710] The amount of PVRIG protein (either ECD or antibody) bound to the beads is analyzed.

[0711] Bead assay setup: 100 k human CD3+ T cells are cultured with 100 k or 200 k beads coated with various concentrations of the PVRIG protein for 5 days in complete IMDM (Gibco, Cat #12440-053) supplemented with 2% AB human serum (Gibco, Cat #34005-100), Glutmax (Gibco, Cat #35050-061), sodium pyruvate (Gibco, Cat #11360-070), MEM Non-Essential Amino Acids Solution (Gibco, Cat #11140-050), and 2-mercaptoethanol (Gibco, Cat #21985). At the end of 5 day culture, cells are stained with anti-CD25, anti-CD4, anti-CD8, and fixable live dead dye to determine CD25 expression levels on each subset of cells. Supernatants are collected and assayed for IFNγ secretion by ELISA (Human INFy duoset, R&D systems, DY285).

[0712] In these experiments human CD3 T cells co-cultured with beads coated with various concentration of PVRIG-protein are analyzed for their level of expression of CD25. Both CD4+ and CD8+ cells are anticipated to show dose dependent inhibition by the PVRIG-ECD-fusion protein, or, conversely, both CD4+ and CD8+ cells are anticipated to show dose dependent activation by the PVRIG-antibody.

### Example 29: Epitope Mapping of Anti-Human PVRIG Antibodies Based on Cynomolgus Cross-Reactivity

### Rationale and Objectives

[0713] The objective of this study is to identify the epitopes on the PVRIG protein that determine cross-reactivity of anti-human PVRIG antibodies against the cynomolgus monkey (cyno) orthologue. Many of the lead antibodies against human PVRIG target show varied degrees of cyno cross-reactivity despite the fact that many of these antibodies belong to the same epitope bin. To shed light on the molecular basis of human/cyno cross-reactivity (or lack thereof), several cyno-to-human mutations of the PVRIG recombinant proteins were designed, expressed and purified, and tested for binding to a panel of anti-human PVRIG antibodies in ELISA.

### Methods

[0714] Design of cyno-to-human PVRIG variants: Sequence alignment of human and PVRIG extracellular domains (ECDs) shows 90% sequence identity and 93% sequence homology between human and cyno orthologs (FIG. 100). Based on the nature of the mutations (conserved vs non-conserved) and the secondary structure prediction (coil vs extended) of the mutation region, three site-directed mutants of the cyno PVRIG were designed to probe the cyno-cross reactivity focused epitope mapping. These mutants include H61R, P67S, and L95R/T97I cyno PVRIG. Wild type cyno and human PVRIG were also generated.

[0715] Expression and purification of cyno, human, and hybrid PVRIG variants: All the PVRIG variants were expressed as ECD fusions with a C-terminal 6×His tag (SEQ ID NO:1556) in mammalian cells. The proteins were purified by affinity purification, ion-exchange chromatography, and size-exclusion chromatography. The purified proteins were buffer-exchanged into PBS buffer (pH 7.4) and stored at 4° C.

[0716] ELISA to determine PVRIG-antibody interaction: The functional ELISA was performed as follows: cyno, human, and cyno/human hybrid PVRIG (His-tagged) recombinant proteins were adsorbed on an IA plate overnight at 4° C. Coated plate wells were rinsed twice with PBS and incubated with 300 μL blocking buffer (5% skim milk powder in PBS pH 7.4) at room temperature (RT) for 1 hr. Blocking buffer was removed and plates were rinsed twice more with PBS. Plate-bound PVRIG variants were incubated with anti-human PVRIG mAbs (human IgG1 isotype) in solution (linear range of 0.1 μg/mL to 8 μg/mL in a 50 μL/well volume) at RT for 1 hr. Plates were washed three times with PBS-T (PBS 7.4, 0.05% Tween20), then three times with PBS and 50 μL/well of a HRP-conjugated secondary antibody was added (Human IgG Fc domain specific, Jackson ImmunoResearch). This was incubated at RT for 1 hr and plates were washed again. ELISA signals were developed in all wells by adding 50 μL of Sureblue TMB substrate (KPL Inc) and incubating for 5-20 mins. The HRP reaction was stopped by adding 50 μL 2N H2SO4 (VWR) and absorbance signals at 450 nm were read on a SpectraMax (Molecular Devices) or EnVision (PerkinElmer) spectrophotometer. The data were exported to Excel (Microsoft) and plotted in GraphPad Prism (GraphPad Software, Inc.).

### Results

[0717] S67, R95, and I97 residues as determinants of cyno cross-reactivity: The binding data shown in FIG. 101 clearly shows that the S67, R95, and I97 residues affect the cyno cross-reactivity of various antibodies. While the P67S cyno-to-human mutation negatively impacts the binding of CPA.7.002 and CPA.7.041, the L95R/T97I cyno-to-human mutation significantly improves the binding of CPA.7.002, CPA.7.021, CPA.7.028, and CPA.7.041. On the other hand, H61R cyno-to-human mutation does not affect the binding of any of the antibodies tested.

[0718] Relative binding to cyno-to-human variants suggests three epitope groups: The relative binding of the antibodies to cyno, human and hybrid PVRIG variants suggests 3 distinct epitope groups: Group 1 binds to R95/I97 residues (CPA.7.021 and CPA.7.028). Group 2 binds to S67 and R95/I97 residues (CPA.7.002 and CPA.7.041). Group 3 does not bind to S67 or R95/I97 residues (CPA.7.024 and CPA.7.050). The epitope groups show strong correlation to the degree of cyno cross-reactivity of these antibodies (FIG. 102).

### Summary and Conclusions

[0719] The restricted epitope mapping based on cyno-to-human variations in the PVRIG ECD identified S67, R95, and I97 residues as determinants of cyno cross-reactivity of anti-human PVRIG antibodies. The complete restoration of binding to L95R/T97I cyno PVRIG for CPA.7.021 and CPA.7.028 antibodies and improved binding of CPA.7.002 to this mutant strongly suggests that R95 and I97 residues are critical human PVRIG epitopes for these antibodies. These findings also suggest a possible way to predict cross-reactivity to non-human primate PVRIG orthologs based on their primary amino acid sequence.

The application's sequence listing, which the Patent Office published only in electronic form, follows.

SEQUENCE LISTING (1589 sequences)

SEQ ID NO: 1 - protein, 20 aa, synthetic construct
  REGION 1..20: note = Description of Artificial Sequence: Synthetic peptide
  REGION 1..20: note = MISC_FEATURE - This sequence may encompass 1-5 "Gly-Gly-Gly-Ser" repeating units
GGGSGGGSGGGSGGGSGGGS

SEQ ID NO: 2 - protein, 7 aa, synthetic construct
  REGION 1..7: note = Description of Artificial Sequence: Synthetic peptide
ENLYFQG

SEQ ID NO: 3 - protein, 11 aa, synthetic construct
  REGION 1..11: note = Description of Artificial Sequence: Synthetic peptide
GSENLYFQGSG

SEQ ID NO: 4 - protein, 26 aa, synthetic construct
  REGION 1..26: note = Description of Artificial Sequence: Synthetic peptide
  REGION 1..25: note = MISC_FEATURE - This region may encompass 1-5 "Glu-Ala-Ala-Ala-Lys" repeating units
EAAAKEAAAKEAAAKEAAAKEAAAKA

SEQ ID NO: 5 - protein, 232 aa, synthetic construct
  REGION 1..232: note = Description of Artificial Sequence: Synthetic polypeptide
EPKSCDKTHTCPPCPAPELLGGPSVFLFPPKPKDTLMISRTPEVTCVVVDVSHEDPEVKFNWYVDGVEVHNAKTKPREEQYNSTYRVVSVLTVLHQDWLNGKEYKCKVSNKALPAPIEKTISKAKGQPREPQVYTLPPSRDELTKNQVSLTCLVKGFYPSDIAVEWESNGQPENNYKTTPPVLDSDGSFFLYSKLTVDKSRWQQGNVFSCSVMHEALHNHYTQKSLSLSPGK

SEQ ID NO: 6 - protein, 217 aa, synthetic construct
  REGION 1..217: note = Description of Artificial Sequence: Synthetic polypeptide
APELLGGPSVFLFPPKPKDTLMISRTPEVTCVVVDVSHEDPEVKFNWYVDGVEVHNAKTKPREEQYNSTYRVVSVLTVLHQDWLNGKEYKCKVSNKALPAPIEKTISKAKGQPREPQVYTLPPSRDELTKNQVSLTCLVKGFYPSDIAVEWESNGQPENNYKTTPPVLDSDGSFFLYSKLTVDKSRWQQGNVFSCSVMHEALHNHYTQKSLSLSPGK

SEQ ID NO: 7 - protein, 233 aa, synthetic construct
  REGION 1..233: note = Description of Artificial Sequence: Synthetic polypeptide
EPRGPTIKPCPPCKCPAPNLLGGPSVFIFPPKIKDVLMISLSPIVTCVVVDVSEDDPDVQISWFVNNVEVHTAQTQTHREDYNSTLRVVSALPIQHQDWMSGKEFKCKVNNKDLPAPIERTISKPKGSVRAPQVYVLPPPEEEMTKKQVTLTCMVTDFMPEDIYVEWTNNGKTELNYKNTEPVLDSDGSYFMYSKLRVEKKNWVERNSYSCSVVHEGLHNHHTTKSFSRTPGK

SEQ ID NO: 8 - protein, 204 aa, Homo sapiens
MGHRTLVLPWVLLTLCVTAGTPEVWVQVRMEATELSSFTIRCGFLGSGSISLVTVSWGGPNGAGGTTLAVLHPERGIRQWAPARQARWETQSSISLILEGSGASSPCANTTFCCKFASFPEGSWEACGSLPPSSDPGLSAPPTPAPILRADLAGILGVSGVLLFGCVYLLHLLRRHKHRPAPRLQPSRTSPQAPRARAWAPSQA

SEQ ID NO: 9 - protein, 224 aa, Homo sapiens
MRTEAQVPALQPPEPGLEGAMGHRTLVLPWVLLTLCVTAGTPEVWVQVRMEATELSSFTIRCGFLGSGSISLVTVSWGGPNGAGGTTLAVLHPERGIRQWAPARQARWETQSSISLILEGSGASSPCANTTFCCKFASFPEGSWEACGSLPPSSDPGLSAPPTPAPILRADLAGILGVSGVLLFGCVYLLHLLRRHKHRPAPRLQPSRTSPQAPRARAWAPSQA

SEQ ID NO: 10 - protein, 19 aa, synthetic construct
  REGION 1..19: note = Description of Artificial Sequence: Synthetic peptide
MGWSCIILFLVATATGVHS

SEQ ID NO: 11 - protein, 382 aa, synthetic construct
  REGION 1..382: note = Description of Artificial Sequence: Synthetic polypeptide
MGWSCIILFLVATATGVHSTPEVWVQVRMEATELSSFTIRCGFLGSGSISLVTVSWGGPNGAGGTTLAVLHPERGIRQWAPARQARWETQSSISLILEGSGASSPCANTTFCCKFASFPEGSWEACGSLPPSSDPGLSAPPTPAPILRADEPKSSDKTHTSPPSPAPELLGGPSVFLFPPKPKDTLMISRTPEVTCVVVDVSHEDPEVKFNWYVDGVEVHNAKTKPREEQYNSTYRVVSVLTVLHQDWLNGKEYKCKVSNKALPAPIEKTISKAKGQPREPQVYTLPPSRDELTKNQVSLTCLVKGFYPSDIAVEWESNGQPENNYKTTPPVLDSDGSFFLYSKLTVDKSRWQQGNVFSCSVMHEALHNHYTQKSLSLSPGK

SEQ ID NO: 12 - protein, 479 aa, Homo sapiens
MARAAALLPSRSPPTPLLWPLLLLLLLETGAQDVRVQVLPEVRGQLGGTVELPCHLLPPVPGLYISLVTWQRPDAPANHQNVAAFHPKMGPSFPSPKPGSERLSFVSAKQSTGQDTEAELQDATLALHGLTVEDEGNYTCEFATFPKGSVRGMTWLRVIAKPKNQAEAQKVTFSQDPTTVALCISKEGRPPARISWLSSLDWEAKETQVSGTLAGTVTVTSRFTLVPSGRADGVTVTCKVEHESFEEPALIPVTLSVRYPPEVSISGYDDNWYLGRTDATLSCDVRSNPEPTGYDWSTTSGTFPTSAVAQGSQLVIHAVDSLFNTTFVCTVTNAVGMGRAEQVIFVRETPRASPRDVGPLVWGAVGGTLLVLLLLAGGSLAFILLRVRRRRKSPGGAGGGASGDGGFYDPKAQVLGNGDPVFWTPVVPGPMEPDGKDEEEEEEEEKAEKGLMLPPPPALEDDMESQLDGSLISRRAVYV

SEQ ID NO: 13 - protein, 518 aa, Homo sapiens
MARAAALLPSRSPPTPLLWPLLLLLLLETGAQDVRVQVLPEVRGQLGGTVELPCHLLPPVPGLYISLVTWQRPDAPANHQNVAAFHPKMGPSFPSPKPGSERLSFVSAKQSTGQDTEAELQDATLALHGLTVEDEGNYTCEFATFPKGSVRGMTWLRVIAKPKNQAEAQKVTFSQDPTTVALCISKEGRPPARISWLSSLDWEAKETQVSGTLAGTVTVTSRFTLVPSGRADGVTVTCKVEHESFEEPALIPVTLSVRYPPEVSISGYDDNWYLGRTDATLSCDVRSNPEPTGYDWSTTSGTFPTSAVAQGSQLVIHAVDSLFNTTFVCTVTNAVGMGRAEQVIFVRETPNTAGAGATGGIIGGIIAAIIATAVAATGILICRQQRKEQTLQGAEEDEDLEGPPSYKPPTPKAKLEAQEMPSQLFTLGASEHSPLKTPYFDAGASCTEQEMPRYHELPTLEERSGPLHPGATSLGSPIPVPPGPPAVEDVSLDLEDEEGEEEEEYLDKINPIYDALSY

SEQ ID NO: 14 - protein, 8 aa, synthetic construct
  REGION 1..8: note = Description of Artificial Sequence: Synthetic peptide
GGTFSSYA

SEQ ID NO: 15 - protein, 8 aa, synthetic construct
  REGION 1..8: note = Description of Artificial Sequence: Synthetic peptide
IIPIFGTA

SEQ ID NO: 16 - protein, 13 aa, synthetic construct
  REGION 1..13: note = Description of Artificial Sequence: Synthetic peptide
AREEVSSPYGMDV

SEQ ID NO: 17 - protein, 9 aa, synthetic construct
  REGION 1..9: note = Description of Artificial Sequence: Synthetic peptide
TGAVTSGHY

SEQ ID NO: 18 - skipped

SEQ ID NO: 19 - protein, 10 aa, synthetic construct
  REGION 1..10: note = Description of Artificial Sequence: Synthetic peptide
LLSYSGASWV

SEQ ID NO: 20 - protein, 8 aa, synthetic construct
  REGION 1..8: note = Description of Artificial Sequence: Synthetic peptide
GFSLSHFS

SEQ ID NO: 21 - protein, 8 aa, synthetic construct
  REGION 1..8: note = Description of Artificial Sequence: Synthetic peptide
FDPEEGGT

SEQ ID NO: 22 - protein, 14 aa, synthetic construct
  REGION 1..14: note = Description of Artificial Sequence: Synthetic peptide
ATGIWYSSGWPVDY

SEQ ID NO: 23 - protein, 11 aa, synthetic construct
  REGION 1..11: note = Description of Artificial Sequence: Synthetic peptide
QSLLDSSGYNY

SEQ ID NO: 24 - skipped

SEQ ID NO: 25 - protein, 9 aa, synthetic construct
  REGION 1..9: note = Description of Artificial Sequence: Synthetic peptide
MQALQTPIT

SEQ ID NO: 26 - protein, 8 aa, synthetic construct
  REGION 1..8: note = Description of Artificial Sequence: Synthetic peptide
GYTLTELS

SEQ ID NO: 27 - protein, 8 aa, synthetic construct
  REGION 1..8: note = Description of Artificial Sequence: Synthetic peptide
FDPEDGET

SEQ ID NO: 28 - protein, 18 aa, synthetic construct
  REGION 1..18: note = Description of Artificial Sequence: Synthetic peptide
ATVSRVRGVINYYYYMDV

SEQ ID NO: 29 - protein, 11 aa, synthetic construct
  REGION 1..11: note = Description of Artificial Sequence: Synthetic peptide
QSLLYRNGNNY

SEQ ID NO: 30 - skipped

SEQ ID NO: 31 - protein, 9 aa, synthetic construct
  REGION 1..9: note = Description of Artificial Sequence: Synthetic peptide
MQALQTPPT

SEQ ID NO: 32 - protein, 8 aa, synthetic construct
  REGION 1..8: note = Description of Artificial Sequence: Synthetic peptide
GGTFGTYA

SEQ ID NO: 33 - protein, 8 aa, synthetic construct
  REGION 1..8: note = Description of Artificial Sequence: Synthetic peptide
ITPISATI

SEQ ID NO: 34 - protein, 13 aa, synthetic construct
  REGION 1..13: note = Description of Artificial Sequence: Synthetic peptide
ARGFEYSDGLLDD

SEQ ID NO: 35 - protein, 12 aa, synthetic construct
  REGION 1..12: note = Description of Artificial Sequence: Synthetic peptide
QSLFYSDDGNTY

SEQ ID NO: 36 - skipped

SEQ ID NO: 37 - protein, 9 aa, synthetic construct
  REGION 1..9: note = Description of Artificial Sequence: Synthetic peptide
MQHMEFPLT

SEQ ID NO: 38 - protein, 9 aa, synthetic construct
  REGION 1..9: note = Description of Artificial Sequence: Synthetic peptide
SGSISSTNW

SEQ ID NO: 39 - protein, 7 aa, synthetic construct
  REGION 1..7: note = Description of Artificial Sequence: Synthetic peptide
IYHSGST

SEQ ID NO: 40 - protein, 10 aa, synthetic construct
  REGION 1..10: note = Description of Artificial Sequence: Synthetic peptide
ARVGPAAIYY

SEQ ID NO: 41 - protein, 8 aa, synthetic construct
  REGION 1..8: note = Description of Artificial Sequence: Synthetic peptide
SNNVGYEG

SEQ ID NO: 42 - skipped

SEQ ID NO: 43 - protein, 11 aa, synthetic construct
  REGION 1..11: note = Description of Artificial Sequence: Synthetic peptide
SAWDSSLNAVV

SEQ ID NO: 44 - protein, 8 aa, synthetic construct
  REGION 1..8: note = Description of Artificial Sequence: Synthetic peptide
GYTLTELS

SEQ ID NO: 45 - protein, 8 aa, synthetic construct
  REGION 1..8: note = Description of Artificial Sequence: Synthetic peptide
FDPEDGET

SEQ ID NO: 46 - protein, 21 aa, synthetic construct
  REGION 1..21: note = Description of Artificial Sequence: Synthetic peptide
ATAKPGIAVAGQNYYYYYMDV

SEQ ID NO: 47 - protein, 11 aa, synthetic construct
  REGION 1..11: note = Description of Artificial Sequence: Synthetic peptide
QSLLYRNGNNY

SEQ ID NO: 48 - skipped

SEQ ID NO: 49 - protein, 9 aa, synthetic construct
  REGION 1..9: note = Description of Artificial Sequence: Synthetic peptide
MQALQTPPT

SEQ ID NO: 50 - protein, 8 aa, synthetic construct
  REGION 1..8: note = Description of Artificial Sequence: Synthetic peptide
GFTFSSYA

SEQ ID NO: 51 - protein, 8 aa, synthetic construct
  REGION 1..8: note = Description of Artificial Sequence: Synthetic peptide
ISYDGSNK

SEQ ID NO: 52 - protein, 17 aa, synthetic construct
  REGION 1..17: note = Description of Artificial Sequence: Synthetic peptide
ASSPIGYSYGYWGGMDV

SEQ ID NO: 53 - protein, 9 aa, synthetic construct
  REGION 1..9: note = Description of Artificial Sequence: Synthetic peptide
SGIDVRTNK

SEQ ID NO: 54 - protein, 7 aa, synthetic construct
  REGION 1..7: note = Description of Artificial Sequence: Synthetic peptide
FQSDSDK

SEQ ID NO: 55 - protein, 9 aa, synthetic construct
  REGION 1..9: note = Description of Artificial Sequence: Synthetic peptide
LIWHTSGWV

SEQ ID NO: 56 - protein, 8 aa, synthetic construct
  REGION 1..8: note = Description of Artificial Sequence: Synthetic peptide
GYTLTELS

SEQ ID NO: 57 - protein, 8 aa, synthetic construct
  REGION 1..8: note = Description of Artificial Sequence: Synthetic peptide
FDPEDGET

SEQ ID NO: 58 - protein, 17 aa, synthetic construct
  REGION 1..17: note = Description of Artificial Sequence: Synthetic peptide
ATGPAAAGVGYYYYMDV

SEQ ID NO: 59 - protein, 11 aa, synthetic construct
  REGION 1..11: note = Description of Artificial Sequence: Synthetic peptide
QSLLYRNGYNY

SEQ ID NO: 60 - skipped

SEQ ID NO: 61 - protein, 9 aa, synthetic construct
  REGION 1..9: note = Description of Artificial Sequence: Synthetic peptide
MQALQTPPT

SEQ ID NO: 62 - protein, 8 aa, synthetic construct
  REGION 1..8: note = Description of Artificial Sequence: Synthetic peptide
GFTFSSYA

SEQ ID NO: 63 - protein, 8 aa, synthetic construct
  REGION 1..8: note = Description of Artificial Sequence: Synthetic peptide
ISYDGSNK

SEQ ID NO: 64 - protein, 20 aa, synthetic construct
  REGION 1..20: note = Description of Artificial Sequence: Synthetic peptide
ARDVMVYCSSTSCYFYGMDV

SEQ ID NO: 65 - protein, 6 aa, synthetic construct
  REGION 1..6: note = Description of Artificial Sequence: Synthetic peptide
QDIRDY

SEQ ID NO: 66 - skipped

SEQ ID NO: 67 - protein, 9 aa, synthetic construct
  REGION 1..9: note = Description of Artificial Sequence: Synthetic peptide
QQFENLPIT

SEQ ID NO: 68 - protein, 8 aa, synthetic construct
  REGION 1..8: note = Description of Artificial Sequence: Synthetic peptide
GYTLTELS

SEQ ID NO: 69 - protein, 8 aa, synthetic construct
  REGION 1..8: note = Description of Artificial Sequence: Synthetic peptide
FDPEDGET

SEQ ID NO: 70 - protein, 18 aa, synthetic construct
  REGION 1..18: note = Description of Artificial Sequence: Synthetic peptide
ATGGYSSGFNYYYYYMDV

SEQ ID NO: 71 - protein, 11 aa, synthetic construct
  REGION 1..11: note = Description of Artificial Sequence: Synthetic peptide
QSLLYRNGNNY

SEQ ID NO: 72 - skipped

SEQ ID NO: 73 - protein, 9 aa, synthetic construct
  REGION 1..9: note = Description of Artificial Sequence: Synthetic peptide
MQALQTPPT

SEQ ID NO: 74 - protein, 8 aa, synthetic construct
  REGION 1..8: note = Description of Artificial Sequence: Synthetic peptide
GYTLTELS

SEQ ID NO: 75 - protein, 8 aa, synthetic construct
  REGION 1..8: note = Description of Artificial Sequence: Synthetic peptide
FDPEDGET

SEQ ID NO: 76 - protein, 14 aa, synthetic construct
  REGION 1..14: note = Description of Artificial Sequence: Synthetic peptide
ATGVTTYYYYGMDV

SEQ ID NO: 77 - protein, 11 aa, synthetic construct
  REGION 1..11: note = Description of Artificial Sequence: Synthetic peptide
QSLLYSNGNNF

SEQ ID NO: 78 - skipped

SEQ ID NO: 79 - protein, 9 aa, synthetic construct
  REGION 1..9: note = Description of Artificial Sequence: Synthetic peptide
MQALQTPPT

SEQ ID NO: 80 - protein, 8 aa, synthetic construct
  REGION 1..8: note = Description of Artificial Sequence: Synthetic peptide
GFTFSSYG

SEQ ID NO: 81 - protein, 8 aa, synthetic construct
  REGION 1..8: note = Description of Artificial Sequence: Synthetic peptide
IRYDGSNK

SEQ ID NO: 82 - protein, 14 aa, synthetic construct
  REGION 1..14: note = Description of Artificial Sequence: Synthetic peptide
ARDLFDFWWDGMDV

SEQ ID NO: 83 - protein, 7 aa, synthetic construct
  REGION 1..7: note = Description of Artificial Sequence: Synthetic peptide
QSVSSMY

SEQ ID NO: 84 - skipped

SEQ ID NO: 85 - protein, 10 aa, synthetic construct
  REGION 1..10: note = Description of Artificial Sequence: Synthetic peptide
QQYVSSPMYT

SEQ ID NO: 86 - protein, 8 aa, synthetic construct
  REGION 1..8: note = Description of Artificial Sequence: Synthetic peptide
GGTFNNYG

SEQ ID NO: 87 - protein, 8 aa, synthetic construct
  REGION 1..8: note = Description of Artificial Sequence: Synthetic peptide
IIPLFGTT

SEQ ID NO: 88 - protein, 15 aa, synthetic construct
  REGION 1..15: note = Description of Artificial Sequence: Synthetic peptide
ARDRMAADGMAVFDY

SEQ ID NO: 89 - protein, 8 aa, synthetic construct
  REGION 1..8: note = Description of Artificial Sequence: Synthetic peptide
SSNIGRHF

SEQ ID NO: 90 - skipped

SEQ ID NO: 91 - protein, 11 aa, synthetic construct
  REGION 1..11: note = Description of Artificial Sequence: Synthetic peptide
SSWDAALNGVV

SEQ ID NO: 92 - protein, 8 aa, synthetic construct
  REGION 1..8: note = Description of Artificial Sequence: Synthetic peptide
GYTLTELS

SEQ ID NO: 93 - protein, 8 aa, synthetic construct
  REGION 1..8: note = Description of Artificial Sequence: Synthetic peptide
FDPEDGET

SEQ ID NO: 94 - protein, 19 aa, synthetic construct
  REGION 1..19: note = Description of Artificial Sequence: Synthetic peptide
ATEVPMVRGARRYYYYMDV

SEQ ID NO: 95 - protein, 11 aa, synthetic construct
  REGION 1..11: note = Description of Artificial Sequence: Synthetic peptide
QTLLYINENNY

SEQ ID NO: 96 - skipped

SEQ ID NO: 97 - protein, 9 aa, synthetic construct
  REGION 1..9: note = Description of Artificial Sequence: Synthetic peptide
MQGLQTPPT

SEQ ID NO: 98 - protein, 10 aa, synthetic construct
  REGION 1..10: note = Description of Artificial Sequence: Synthetic peptide
GGSISNSNYY

SEQ ID NO: 99 - protein, 7 aa, synthetic construct
  REGION 1..7: note = Description of Artificial Sequence: Synthetic peptide
IYYSGST

SEQ ID NO: 100 - protein, 15 aa, synthetic construct
  REGION 1..15: note = Description of Artificial Sequence: Synthetic peptide
ARGAWELSLGDWFDP

SEQ ID NO: 101 - protein, 9 aa, synthetic construct
  REGION 1..9: note = Description of Artificial Sequence: Synthetic peptide
SSNIGAGYD

SEQ ID NO: 102 - skipped

SEQ ID NO: 103 - protein, 12 aa, synthetic construct
  REGION 1..12: note = Description of Artificial Sequence: Synthetic peptide
QSYDSSLSVYVV

SEQ ID NO: 104 - protein, 8 aa, synthetic construct
  REGION 1..8: note = Description of Artificial Sequence: Synthetic peptide
GFTFGTSS

SEQ ID NO: 105 - protein, 8 aa, synthetic construct
  REGION 1..8: note = Description of Artificial Sequence: Synthetic peptide
ISFDGTEI

SEQ ID NO: 106 - protein, 15 aa, synthetic construct
  REGION 1..15: note = Description of Artificial Sequence: Synthetic peptide
AKGSGNIYFYSGMDV

SEQ ID NO: 107 - protein, 6 aa, synthetic construct
  REGION 1..6: note = Description of Artificial Sequence: Synthetic peptide
QSISGW

SEQ ID NO: 108 - skipped

SEQ ID NO: 109 - protein, 9 aa, synthetic construct
  REGION 1..9: note = Description of Artificial Sequence: Synthetic peptide
QQYYSYPLT

SEQ ID NO: 110 - protein, 8 aa, synthetic construct
  REGION 1..8: note = Description of Artificial Sequence: Synthetic peptide
GYTLTELS

SEQ ID NO: 111 - protein, 8 aa, synthetic construct
  REGION 1..8: note = Description of Artificial Sequence: Synthetic peptide
FDPEDGET

SEQ ID NO: 112 - protein, 19 aa, synthetic construct
  REGION 1..19: note = Description of Artificial Sequence: Synthetic peptide
ATGVPAAIGVYYYYYYMDV

SEQ ID NO: 113 - protein, 11 aa, synthetic construct
  REGION 1..11: note = Description of Artificial Sequence: Synthetic peptide
QSLLYSNGYNY

SEQ ID NO: 114 - skipped

SEQ ID NO: 115 - protein, 9 aa, synthetic construct
  REGION 1..9: note = Description of Artificial Sequence: Synthetic peptide
MQALQSPVT

SEQ ID NO: 116 - protein, 8 aa, synthetic construct
  REGION 1..8: note = Description of Artificial Sequence: Synthetic peptide
GYTLTELS

SEQ ID NO: 117 - protein, 8 aa, synthetic construct
  REGION 1..8: note = Description of Artificial Sequence: Synthetic peptide
FDPEDGET

SEQ ID NO: 118 - protein, 20 aa, synthetic construct
  REGION 1..20: note = Description of Artificial Sequence: Synthetic peptide
ATDSRDGPAARGGYYYYMDV

SEQ ID NO: 119 - protein, 11 aa, synthetic construct
  REGION 1..11: note = Description of Artificial Sequence: Synthetic peptide
QSLLYINGYNY

SEQ ID NO: 120 - skipped

SEQ ID NO: 121 - protein, 9 aa, synthetic construct
  REGION 1..9: note = Description of Artificial Sequence: Synthetic peptide
MQALQTPPT

SEQ ID NO: 122 - protein, 8 aa, synthetic construct
  REGION 1..8: note = Description of Artificial Sequence: Synthetic peptide
GGTFSSYA

SEQ ID NO: 123 - protein, 8 aa, synthetic construct
  REGION 1..8: note = Description of Artificial Sequence: Synthetic peptide
IIPIFGTA

SEQ ID NO: 124 - protein, 20 aa, synthetic construct
  REGION 1..20: note = Description of Artificial Sequence: Synthetic peptide
ARDAYYYDSSGYYNPDAFDI

SEQ ID NO: 125 - protein, 11 aa, synthetic construct
  REGION 1..11: note = Description of Artificial Sequence: Synthetic peptide
QSLLHSNGYNY

SEQ ID NO: 126 - skipped

SEQ ID NO: 127 - protein, 9 aa, synthetic construct
  REGION 1..9: note = Description of Artificial Sequence: Synthetic peptide
MQGLQTPRT

SEQ ID NO: 128 - protein, 8 aa, synthetic construct
  REGION 1..8: note = Description of Artificial Sequence: Synthetic peptide
GGTFSSSA

SEQ ID NO: 129 - protein, 8 aa, synthetic construct
  REGION 1..8: note = Description of Artificial Sequence: Synthetic peptide
IIPIYGIT

SEQ ID NO: 130 - protein, 22 aa, synthetic construct
  REGION 1..22: note = Description of Artificial Sequence: Synthetic peptide
ARDDTARRVRGVPYYYYYAMDV

SEQ ID NO: 131 - protein, 6 aa, synthetic construct
  REGION 1..6: note = Description of Artificial Sequence: Synthetic peptide
QDIDDD

SEQ ID NO: 132 - skipped

SEQ ID NO: 133 - protein, 9 aa, synthetic construct
  REGION 1..9: note = Description of Artificial Sequence: Synthetic peptide
LQHDNLPLT

SEQ ID NO: 134 - protein, 8 aa, synthetic construct
  REGION 1..8: note = Description of Artificial Sequence: Synthetic peptide
GYTLTELS

SEQ ID NO: 135 - protein, 8 aa, synthetic construct
  REGION 1..8: note = Description of Artificial Sequence: Synthetic peptide
FDPEDGET

SEQ ID NO: 136 - protein, 19 aa, synthetic construct
  REGION 1..19: note = Description of Artificial Sequence: Synthetic peptide
ATEDPGPVAGPYYYYGMDV

SEQ ID NO: 137 - protein, 11 aa, synthetic construct
  REGION 1..11: note = Description of Artificial Sequence: Synthetic peptide
QSLLYINGYHY

SEQ ID NO: 138 - skipped

SEQ ID NO: 139 - protein, 9 aa, synthetic construct
  REGION 1..9: note = Description of Artificial Sequence: Synthetic peptide
MQALQTPPT

SEQ ID NO: 140 - protein, 8 aa, synthetic construct
  REGION 1..8: note = Description of Artificial Sequence: Synthetic peptide
GGTFSSSA

SEQ ID NO: 141 - protein, 8 aa, synthetic construct
  REGION 1..8: note = Description of Artificial Sequence: Synthetic peptide
IIPIYGIT

SEQ ID NO: 142 - protein, 22 aa, synthetic construct
  REGION 1..22: note = Description of Artificial Sequence: Synthetic peptide
ARDDTARRVRGVPYYYYYAMDV

SEQ ID NO: 143 - protein, 12 aa, synthetic construct
  REGION 1..12: note = Description of Artificial Sequence: Synthetic peptide
QSLLDSDDGNTY

SEQ ID NO: 144 - skipped

SEQ ID NO: 145 - protein, 9 aa, synthetic construct
  REGION 1..9: note = Description of Artificial Sequence: Synthetic peptide
MQRLQFPLT

SEQ ID NO: 146 - protein, 8 aa, synthetic construct
  REGION 1..8: note = Description of Artificial Sequence: Synthetic peptide
GYTLTELS

SEQ ID NO: 147 - protein, 8 aa, synthetic construct
  REGION 1..8: note = Description of Artificial Sequence: Synthetic peptide
FDPEDGET

SEQ ID NO: 148 - protein, 19 aa, synthetic construct
  REGION 1..19: note = Description of Artificial Sequence: Synthetic peptide
ATGVPAAIGVYYYYYYMDV

SEQ ID NO: 149 - protein, 11 aa, synthetic construct
  REGION 1..11: note = Description of Artificial Sequence: Synthetic peptide
QSLLYRNGYNY

SEQ ID NO: 150 - skipped

SEQ ID NO: 151 - protein, 9 aa, synthetic construct
  REGION 1..9: note = Description of Artificial Sequence: Synthetic peptide
MQAVQNPPT

SEQ ID NO: 152 - protein, 8 aa, synthetic construct
  REGION 1..8: note = Description of Artificial Sequence: Synthetic peptide
GGTFSSSA

SEQ ID NO: 153 - protein, 8 aa, synthetic construct
  REGION 1..8: note = Description of Artificial Sequence: Synthetic peptide
IIPIYGIT

SEQ ID NO: 154 - protein, 22 aa, synthetic construct
  REGION 1..22: note = Description of Artificial Sequence: Synthetic peptide
ARDDTARRVRGVPYYYYYAMDV

SEQ ID NO: 155 - protein, 6 aa, synthetic construct
  REGION 1..6: note = Description of Artificial Sequence: Synthetic peptide
QTMNNY

SEQ ID NO: 156 - skipped

SEQ ID NO: 157 - protein, 10 aa, synthetic construct
  REGION 1..10: note = Description of Artificial Sequence: Synthetic peptide
QQYGDWLPIT

SEQ ID NO: 158 - protein, 8 aa, synthetic construct
  REGION 1..8: note = Description of Artificial Sequence: Synthetic peptide
GYTLTELS

SEQ ID NO: 159 - protein, 8 aa, synthetic construct
  REGION 1..8: note = Description of Artificial Sequence: Synthetic peptide
FDPEDGET

SEQ ID NO: 160 - protein, 17 aa, synthetic construct
  REGION 1..17: note = Description of Artificial Sequence: Synthetic peptide
ATAFPEATISYYYYMDV

SEQ ID NO: 161 - protein, 11 aa, synthetic construct
  REGION 1..11: note = Description of Artificial Sequence: Synthetic peptide
QSLLYRNGYNY

SEQ ID NO: 162 - skipped

SEQ ID NO: 163 - protein, 9 aa, synthetic construct
  REGION 1..9: note = Description of Artificial Sequence: Synthetic peptide
MQAVQNPPT

SEQ ID NO: 164 - protein, 8 aa, synthetic construct
  REGION 1..8: note = Description of Artificial Sequence: Synthetic peptide
GGTFSSSA

SEQ ID NO: 165 - protein, 8 aa, synthetic construct
  REGION 1..8: note = Description of Artificial Sequence: Synthetic peptide
IIPIYGIT

SEQ ID NO: 166 - protein, 22 aa, synthetic construct
  REGION 1..22: note = Description of Artificial Sequence: Synthetic peptide
ARDDTARRVRGVPYYYYYAMDV

SEQ ID NO: 167 - protein, 12 aa, synthetic construct
  REGION 1..12: note = Description of Artificial Sequence: Synthetic peptide
RSLLDSDDGNTH

SEQ ID NO: 168 - skipped

SEQ ID NO: 169 - protein, 9 aa, synthetic construct
  REGION 1..9: note = Description of Artificial Sequence: Synthetic peptide
MQRKEFPLT

SEQ ID NO: 170 - protein, 8 aa, synthetic construct
  REGION 1..8: note = Description of Artificial Sequence: Synthetic peptide
GGTFSSYA

SEQ ID NO: 171 - protein, 8 aa, synthetic construct
  REGION 1..8: note = Description of Artificial Sequence: Synthetic peptide
IIPIFGTA

SEQ ID NO: 172 - protein, 21 aa, synthetic construct
  REGION 1..21: note = Description of Artificial Sequence: Synthetic peptide
ARGPWYYDSSGYSSYAYYMDV

SEQ ID NO: 173 - protein, 11 aa, synthetic construct
  REGION 1..11: note = Description of Artificial Sequence: Synthetic peptide
QSLLHSDGYNY

SEQ ID NO: 174 - skipped

SEQ ID NO: 175 - protein, 10 aa, synthetic construct
  REGION 1..10: note = Description of Artificial Sequence: Synthetic peptide
MQALHTPGVT

SEQ ID NO: 176 - protein, 120 aa, synthetic construct
  REGION 1..120: note = Description of Artificial Sequence: Synthetic polypeptide
QMQLVQSGAEVKKPGSSVKVSCKASGGTFSSYAISWVRQAPGQGLEWMGGIIPIFGTANYAQKFQGRVTITADESTSTAYMELSSLRSEDTAVYYCAREEVSSPYGMDVWGQGTTVTVSS

SEQ ID NO: 177 - protein, 8 aa, synthetic construct
  REGION 1..8: note = Description of Artificial Sequence: Synthetic peptide
GGTFSSYA

SEQ ID NO: 178 - protein, 8 aa, synthetic construct
  REGION 1..8: note = Description of Artificial Sequence: Synthetic peptide
IIPIFGTA

SEQ ID NO: 179 - protein, 13 aa, synthetic construct
  REGION 1..13: note = Description of Artificial Sequence: Synthetic peptide
AREEVSSPYGMDV

SEQ ID NO: 180 - protein, 450 aa, synthetic construct
  REGION 1..450: note = Description of Artificial Sequence: Synthetic polypeptide
QMQLVQSGAEVKKPGSSVKVSCKASGGTFSSYAISWVRQAPGQGLEWMGGIIPIFGTANYAQKFQGRVTITADESTSTAYMELSSLRSEDTAVYYCAREEVSSPYGMDVWGQGTTVTVSSASTKGPSVFPLAPSSKSTSGGTAALGCLVKDYFPEPVTVSWNSGALTSGVHTFPAVLQSSGLYSLSSVVTVPSSSLGTQTYICNVNHKPSNTKVDKKVEPKSCDKTHTCPPCPAPELLGGPSVFLFPPKPKDTLMISRTPEVTCVVVDVSHEDPEVKFNWYVDGVEVHNAKTKPREEQYNSTYRVVSVLTVLHQDWLNGKEYKCKVSNKALPAPIEKTISKAKGQPREPQVYTLPPSREEMTKNQVSLTCLVKGFYPSDIAVEWESNGQPENNYKTTPPVLDSDGSFFLYSKLTVDKSRWQQGNVFSCSVMHEALHNHYTQKSLSLSPGK

SEQ ID NO: 181 - protein, 111 aa, synthetic construct
  REGION 1..111: note = Description of Artificial Sequence: Synthetic polypeptide
QAVVTQEPSLTVSPGGTVTLTCGTSTGAVTSGHYPYWFQQKPGQAPKTLIYDTGNKHSWTPARFSGSLLGGKAALTLSGAQPEDEADYYCLLSYSGASWVFGGGTKLTVLG

SEQ ID NO: 182 - protein, 9 aa, synthetic construct
  REGION 1..9: note = Description of Artificial Sequence: Synthetic peptide
TGAVTSGHY

SEQ ID NO: 183 - skipped

SEQ ID NO: 184 - protein, 10 aa, synthetic construct
  REGION 1..10: note = Description of Artificial Sequence: Synthetic peptide
LLSYSGASWV

SEQ ID NO: 185 - protein, 216 aa, synthetic construct
  REGION 1..216: note = Description of Artificial Sequence: Synthetic polypeptide
QAVVTQEPSLTVSPGGTVTLTCGTSTGAVTSGHYPYWFQQKPGQAPKTLIYDTGNKHSWTPARFSGSLLGGKAALTLSGAQPEDEADYYCLLSYSGASWVFGGGTKLTVLGQPKAAPSVTLFPPSSEELQANKATLVCLISDFYPGAVTVAWKADSSPVKAGVETTTPSKQSNNKYAASSYLSLTPEQWKSHRSYSCQVTHEGSTVEKTVAPTECS

SEQ ID NO: 186 - protein, 121 aa, synthetic construct
  REGION 1..121: note = Description of Artificial Sequence: Synthetic polypeptide
QVQLVQSGAEVKKPGASVKVSCKVSGFSLSHFSMHWVRQVPGKGLEWLGGFDPEEGGTIPAQKFQGRLTMTEDTSTETAYMELSSLRSEDTAVYYCATGIWYSSGWPVDYWGPGTLVTVSS

SEQ ID NO: 187 - protein, 8 aa, synthetic construct
  REGION 1..8: note = Description of Artificial Sequence: Synthetic peptide
GFSLSHFS

SEQ ID NO: 188 - protein, 8 aa, synthetic construct
  REGION 1..8: note = Description of Artificial Sequence: Synthetic peptide
FDPEEGGT

SEQ ID NO: 189 - protein, 14 aa, synthetic construct
  REGION 1..14: note = Description of Artificial Sequence: Synthetic peptide
ATGIWYSSGWPVDY

SEQ ID NO: 190 - protein, 458 aa, synthetic construct
  REGION 1..458: note = Description of Artificial Sequence: Synthetic polypeptide
EVQLVQSGAEVKKPGSSVKVSCKASGGTFSSYAISWVRQAPGQGLEWMGGIIPIFGTANYAQKFQGRVTITADKSTSTAYMELSSLRSEDTAVYYCARGPWYYDSSGYSSYAYYMDVWGQGTTVTVSSASTKGPSVFPLAPSSKSTSGGTAALGCLVKDYFPEPVTVSWNSGALTSGVHTFPAVLQSSGLYSLSSVVTVPSSSLGTQTYICNVNHKPSNTKVDKKVEPKSCDKTHTCPPCPAPELLGGPSVFLFPPKPKDTLMISRTPEVTCVVVDVSHEDPEVKFNWYVDGVEVHNAKTKPREEQYNSTYRVVSVLTVLHQDWLNGKEYKCKVSNKALPAPIEKTISKAKGQPREPQVYTLPPSREEMTKNQVSLTCLVKGFYPSDIAVEWESNGQPENNYKTTPPVLDSDGSFFLYSKLTVDKSRWQQGNVFSCSVMHEALHNHYTQKSLSLSPGK

SEQ ID NO: 191 - protein, 113 aa, synthetic construct
  REGION 1..113: note = Description of Artificial Sequence: Synthetic polypeptide
DVVMTQSPLSLPVTPGGPASISCRSSQSLLDSSGYNYVDWYLQKPGQSPQLLISLGSDRASGVPDRFSGSGSGTDFTLKISRVEAEDVGIYYCMQALQTPITFGQGTRLEIKR

SEQ ID NO: 192 - protein, 11 aa, synthetic construct
  REGION 1..11: note = Description of Artificial Sequence: Synthetic peptide
QSLLDSSGYNY

SEQ ID NO: 193 - skipped

SEQ ID NO: 194 - protein, 9 aa, synthetic construct
  REGION 1..9: note = Description of Artificial Sequence: Synthetic peptide
MQALQTPIT

SEQ ID NO: 195 - protein, 219 aa, synthetic construct
  REGION 1..219: note = Description of Artificial Sequence: Synthetic polypeptide
DVVMTQSPLSLPVTPGGPASISCRSSQSLLDSSGYNYVDWYLQKPGQSPQLLISLGSDRASGVPDRFSGSGSGTDFTLKISRVEAEDVGIYYCMQALQTPITFGQGTRLEIKRTVAAPSVFIFPPSDEQLKSGTASVVCLLNNFYPREAKVQWKVDNALQSGNSQESVTEQDSKDSTYSLSSTLTLSKADYEKHKVYACEVTHQGLSSPVTKSFNRGEC

SEQ ID NO: 196 - protein, 125 aa, synthetic construct
  REGION 1..125: note = Description of Artificial Sequence: Synthetic polypeptide
EVQLVQSGAEVKKPGASVKVSCKVSGYTLTELSMHWVRQAPGKGLEWMGGFDPEDGETIYAQKFQGRVTMTEDTSTDTAYMELSSLRSEDTAVYYCATVSRVRGVINYYYYMDVWGKGTTVTVSS

SEQ ID NO: 197 - protein, 8 aa, synthetic construct
  REGION 1..8: note = Description of Artificial Sequence: Synthetic peptide
GYTLTELS

SEQ ID NO: 198 - protein, 8 aa, synthetic construct
  REGION 1..8: note = Description of Artificial Sequence: Synthetic peptide
FDPEDGET

SEQ ID NO: 199 - protein, 18 aa, synthetic construct
  REGION 1..18: note = Description of Artificial Sequence: Synthetic peptide
ATVSRVRGVINYYYYMDV

SEQ ID NO: 200 - protein, 455 aa, synthetic construct
  REGION 1..455: note = Description of Artificial Sequence: Synthetic polypeptide
EVQLVQSGAEVKKPGASVKVSCKVSGYTLTELSMHWVRQAPGKGLEWMGGFDPEDGETIYAQKFQGRVTMTEDTSTDTAYMELSSLRSEDTAVYYCATVSRVRGVINYYYYMDVWGKGTTVTVSSASTKGPSVFPLAPSSKSTSGGTAALGCLVKDYFPEPVTVSWNSGALTSGVHTFPAVLQSSGLYSLSSVVTVPSSSLGTQTYICNVNHKPSNTKVDKKVEPKSCDKTHTCPPCPAPELLGGPSVFLFPPKPKDTLMISRTPEVTCVVVDVSHEDPEVKFNWYVDGVEVHNAKTKPREEQYNSTYRVVSVLTVLHQDWLNGKEYKCKVSNKALPAPIEKTISKAKGQPREPQVYTLPPSREEMTKNQVSLTCLVKGFYPSDIAVEWESNGQPENNYKTTPPVLDSDGSFFLYSKLTVDKSRWQQGNVFSCSVMHEALHNHYTQKSLSLSPGK

SEQ ID NO: 201 - protein, 113 aa, synthetic construct
  REGION 1..113: note = Description of Artificial Sequence: Synthetic polypeptide
DVVMTQSPLSLPVTPGEPASISCRSSQSLLYRNGNNYLDWYLQKPGQSPQLLIYLGSNRASGVPDRFSGSGSGTDFTLKISRVEAEDVGVYYCMQALQTPPTFGGGTKLEIKR

SEQ ID NO: 202 - protein, 11 aa, synthetic construct
  REGION 1..11: note = Description of Artificial Sequence: Synthetic peptide
QSLLYRNGNNY

SEQ ID NO: 203 - skipped

SEQ ID NO: 204 - protein, 9 aa, synthetic construct
  REGION 1..9: note = Description of Artificial Sequence: Synthetic peptide
MQALQTPPT

SEQ ID NO: 205 - protein, 219 aa, synthetic construct
  REGION 1..219: note = Description of Artificial Sequence: Synthetic polypeptide
DVVMTQSPLSLPVTPGEPASISCRSSQSLLYRNGNNYLDWYLQKPGQSPQLLIYLGSNRASGVPDRFSGSGSGTDFTLKISRVEAEDVGVYYCMQALQTPPTFGGGTKLEIKRTVAAPSVFIFPPSDEQLKSGTASVVCLLNNFYPREAKVQWKVDNALQSGNSQESVTEQDSKDSTYSLSSTLTLSKADYEKHKVYACEVTHQGLSSPVTKSFNRGEC

SEQ ID NO: 206 - protein, 120 aa, synthetic construct
  REGION 1..120: note = Description of Artificial Sequence: Synthetic polypeptide
QVQLVQSGAEVRRPGSSVRVSCKPSGGTFGTYAFTWVRQAPGQGLEWMGGITPISATINRAQNLQDRLTITADESTTTVHMDLTSLRSEDTAVYYCARGFEYSDGLLDDWGQGTLVTVSS

SEQ ID NO: 207 - protein, 8 aa, synthetic construct
  REGION 1..8: note = Description of Artificial Sequence: Synthetic peptide
GGTFGTYA

SEQ ID NO: 208 - protein, 8 aa, synthetic construct
  REGION 1..8: note = Description of Artificial Sequence: Synthetic peptide
ITPISATI

SEQ ID NO: 209 - protein, 13 aa, synthetic construct
  REGION 1..13: note = Description of Artificial Sequence: Synthetic peptide
ARGFEYSDGLLDD

SEQ ID NO: 210 - protein, 450 aa, synthetic construct
  REGION 1..450: note = Description of Artificial Sequence: Synthetic polypeptide
QVQLVQSGAEVRRPGSSVRVSCKPSGGTFGTYAFTWVRQAPGQGLEWMGGITPISATINRAQNLQDRLTITADESTTTVHMDLTSLRSEDTAVYYCARGFEYSDGLLDDWGQGTLVTVSSASTKGPSVFPLAPSSKSTSGGTAALGCLVKDYFPEPVTVSWNSGALTSGVHTFPAVLQSSGLYSLSSVVTVPSSSLGTQTYICNVNHKPSNTKVDKKVEPKSCDKTHTCPPCPAPELLGGPSVFLFPPKPKDTLMISRTPEVTCVVVDVSHEDPEVKFNWYVDGVEVHNAKTKPREEQYNSTYRVVSVLTVLHQDWLNGKEYKCKVSNKALPAPIEKTISKAKGQPREPQVYTLPPSREEMTKNQVSLTCLVKGFYPSDIAVEWESNGQPENNYKTTPPVLDSDGSFFLYSKLTVDKSRWQQGNVFSCSVMHEALHNHYTQKSLSLSPGK

SEQ ID NO: 211 - protein, 114 aa, synthetic construct
  REGION 1..114: note = Description of Artificial Sequence: Synthetic polypeptide
DIVMTQTPLSLPVIPGEPASISCRSSQSLFYSDDGNTYLDWYLQKPGQSPQLLIYRLSHRASGVPDRFSGSGSGTDFTLKISRVEAEDVGVYYCMQHMEFPLTFGGGTKVEIKR

SEQ ID NO: 212 - protein, 12 aa, synthetic construct
  REGION 1..12: note = Description of Artificial Sequence: Synthetic peptide
QSLFYSDDGNTY

SEQ ID NO: 213 - skipped

SEQ ID NO: 214 - protein, 9 aa, synthetic construct
  REGION 1..9: note = Description of Artificial Sequence: Synthetic peptide
MQHMEFPLT

SEQ ID NO: 215 - protein, 220 aa, synthetic construct
  REGION 1..220: note = Description of Artificial Sequence: Synthetic polypeptide
DIVMTQTPLSLPVIPGEPASISCRSSQSLFYSDDGNTYLDWYLQKPGQSPQLLIYRLSHRASGVPDRFSGSGSGTDFTLKISRVEAEDVGVYYCMQHMEFPLTFGGGTKVEIKRTVAAPSVFIFPPSDEQLKSGTASVVCLLNNFYPREAKVQWKVDNALQSGNSQESVTEQDSKDSTYSLSSTLTLSKADYEKHKVYACEVTHQGLSSPVTKSFNRGEC

SEQ ID NO: 216 - protein, 117 aa, synthetic construct
  REGION 1..117: note = Description of Artificial Sequence: Synthetic polypeptide
QVQLQESGPGLVKPSGTLSLTCVVSSGSISSTNWWTWVRQPPGKGLEWIGEIYHSGSTSYNSSLKSRVTISEDKSKNQISLRLSSVTAADTAVYYCARVGPAAIYYWGQGTLVTVSS

SEQ ID NO: 217 - protein, 9 aa, synthetic construct
  REGION 1..9: note = Description of Artificial Sequence: Synthetic peptide
SGSISSTNW

SEQ ID NO: 218 - protein, 7 aa, synthetic construct
  REGION 1..7: note = Description of Artificial Sequence: Synthetic peptide
IYHSGST

SEQ ID NO: 219 - protein, 10 aa, synthetic construct
  REGION 1..10: note = Description of Artificial Sequence: Synthetic peptide
ARVGPAAIYY

SEQ ID NO: 220 - protein, 447 aa, synthetic construct
  REGION 1..447: note = Description of Artificial Sequence: Synthetic polypeptide
QVQLQESGPGLVKPSGTLSLTCVVSSGSISSTNWWTWVRQPPGKGLEWIGEIYHSGSTSYNSSLKSRVTISEDKSKNQISLRLSSVTAADTAVYYCARVGPAAIYYWGQGTLVTVSSASTKGPSVFPLAPSSKSTSGGTAALGCLVKDYFPEPVTVSWNSGALTSGVHTFPAVLQSSGLYSLSSVVTVPSSSLGTQTYICNVNHKPSNTKVDKKVEPKSCDKTHTCPPCPAPELLGGPSVFLFPPKPKDTLMISRTPEVTCVVVDVSHEDPEVKFNWYVDGVEVHNAKTKPREEQYNSTYRVVSVLTVLHQDWLNGKEYKCKVSNKALPAPIEKTISKAKGQPREPQVYTLPPSREEMTKNQVSLTCLVKGFYPSDIAVEWESNGQPENNYKTTPPVLDSDGSFFLYSKLTVDKSRWQQGNVFSCSVMHEALHNHYTQKSLSLSPGK

SEQ ID NO: 221 - protein, 111 aa, synthetic construct
  REGION 1..111: note = Description of Artificial Sequence: Synthetic polypeptide
QAGLTQPPSVSKGLRQTATLTCTGNSNNVGYEGAAWLQQHQGHAPKLLLYRNNNRPSGISKRFSASRSGNTASLTITGLQPEDEADYYCSAWDSSLNAVVFGGGTQLTVLG

SEQ ID NO: 222 - protein, 8 aa, synthetic construct
  REGION 1..8: note = Description of Artificial Sequence: Synthetic peptide
SNNVGYEG

SEQ ID NO: 223 - skipped

SEQ ID NO: 224 - protein, 11 aa, synthetic construct
  REGION 1..11: note = Description of Artificial Sequence: Synthetic peptide
SAWDSSLNAVV

SEQ ID NO: 225 - protein, 216 aa, synthetic construct
  REGION 1..216: note = Description of Artificial Sequence: Synthetic polypeptide
QAGLTQPPSVSKGLRQTATLTCTGNSNNVGYEGAAWLQQHQGHAPKLLLYRNNNRPSGISKRFSASRSGNTASLTITGLQPEDEADYYCSAWDSSLNAVVFGGGTQLTVLGQPKAAPSVTLFPPSSEELQANKATLVCLISDFYPGAVTVAWKADSSPVKAGVETTTPSKQSNNKYAASSYLSLTPEQWKSHRSYSCQVTHEGSTVEKTVAPTECS

SEQ ID NO: 226 - protein, 128 aa, synthetic construct
  REGION 1..128: note = Description of Artificial Sequence: Synthetic polypeptide
EVQLVQSGAEVKKPGASVKVSCKVSGYTLTELSMHWVRQAPGKGLEWMGGFDPEDGETIYAQKFQGRVTMTEDTSTDTAYMELSSLRSEDTAVYYCATAKPGIAVAGQNYYYYYMDVWGKGTTVTVSS

SEQ ID NO: 227 - protein, 8 aa, synthetic construct
  REGION 1..8: note = Description of Artificial Sequence: Synthetic peptide
GYTLTELS

SEQ ID NO: 228 - protein, 8 aa, synthetic construct
  REGION 1..8: note = Description of Artificial Sequence: Synthetic peptide
FDPEDGET

SEQ ID NO: 229 - protein, 21 aa, synthetic construct
  REGION 1..21: note = Description of Artificial Sequence: Synthetic peptide
ATAKPGIAVAGQNYYYYYMDV

SEQ ID NO: 230 - protein, 458 aa, synthetic construct
  REGION 1..458: note = Description of Artificial Sequence: Synthetic polypeptide
EVQLVQSGAEVKKPGASVKVSCKVSGYTLTELSMHWVRQAPGKGLEWMGGFDPEDGETIYAQKFQGRVTMTEDTSTDTAYMELSSLRSEDTAVYYCATAKPGIAVAGQNYYYYYMDVWGKGTTVTVSSASTKGPSVFPLAPSSKSTSGGTAALGCLVKDYFPEPVTVSWNSGALTSGVHTFPAVLQSSGLYSLSSVVTVPSSSLGTQTYICNVNHKPSNTKVDKKVEPKSCDKTHTCPPCPAPELLGGPSVFLFPPKPKDTLMISRTPEVTCVVVDVSHEDPEVKFNWYVDGVEVHNAKTKPREEQYNSTYRVVSVLTVLHQDWLNGKEYKCKVSNKALPAPIEKTISKAKGQPREPQVYTLPPSREEMTKNQVSLTCLVKGFYPSDIAVEWESNGQPENNYKTTPPVLDSDGSFFLYSKLTVDKSRWQQGNVFSCSVMHEALHNHYTQKSLSLSPGK

SEQ ID NO: 231 - protein, 113 aa, synthetic construct; identical to SEQ ID NO: 201
  REGION 1..113: note = Description of Artificial Sequence: Synthetic polypeptide

SEQ ID NO: 232 - protein, 11 aa, synthetic construct
  REGION 1..11: note = Description of Artificial Sequence: Synthetic peptide
QSLLYRNGNNY

SEQ ID NO: 233 - skipped

SEQ ID NO: 234 - protein, 9 aa, synthetic construct
  REGION 1..9: note = Description of Artificial Sequence: Synthetic peptide
MQALQTPPT

SEQ ID NO: 235 - protein, 219 aa, synthetic construct; identical to SEQ ID NO: 205
  REGION 1..219: note = Description of Artificial Sequence: Synthetic polypeptide

SEQ ID NO: 236 - protein, 124 aa, synthetic construct
  REGION 1..124: note = Description of Artificial Sequence: Synthetic polypeptide
EVQLVESGGGLVQPGRSLRLSCAASGFTFSSYAMHWVRQAPGKGLEWVAVISYDGSNKYYADSVKGRFTISRDNSKNTLYLQMNSLRAEDTAVYYCASSPIGYSYGYWGGMDVWGQGTTVTVSS

SEQ ID NO: 237 - protein, 8 aa, synthetic construct
  REGION 1..8: note = Description of Artificial Sequence: Synthetic peptide
GFTFSSYA

SEQ ID NO: 238 - protein, 8 aa, synthetic construct
  REGION 1..8: note = Description of Artificial Sequence: Synthetic peptide
ISYDGSNK

SEQ ID NO: 239 - protein, 17 aa, synthetic construct
  REGION 1..17: note = Description of Artificial Sequence: Synthetic peptide
ASSPIGYSYGYWGGMDV

SEQ ID NO: 240 - protein, 454 aa, synthetic construct
  REGION 1..454: note = Description of Artificial Sequence: Synthetic polypeptide
EVQLVESGGGLVQPGRSLRLSCAASGFTFSSYAMHWVRQAPGKGLEWVAVISYDGSNKYYADSVKGRFTISRDNSKNTLYLQMNSLRAEDTAVYYCASSPIGYSYGYWGGMDVWGQGTTVTVSSASTKGPSVFPLAPSSKSTSGGTAALGCLVKDYFPEPVTVSWNSGALTSGVHTFPAVLQSSGLYSLSSVVTVPSSSLGTQTYICNVNHKPSNTKVDKKVEPKSCDKTHTCPPCPAPELLGGPSVFLFPPKPKDTLMISRTPEVTCVVVDVSHEDPEVKFNWYVDGVEVHNAKTKPREEQYNSTYRVVSVLTVLHQDWLNGKEYKCKVSNKALPAPIEKTISKAKGQPREPQVYTLPPSREEMTKNQVSLTCLVKGFYPSDIAVEWESNGQPENNYKTTPPVLDSDGSFFLYSKLTVDKSRWQQGNVFSCSVMHEALHNHYTQKSLSLSPGK

SEQ ID NO: 241 - protein, 116 aa, synthetic construct
  REGION 1..116: note = Description of Artificial Sequence: Synthetic polypeptide
QAVLTQPASLSASPGASASLTCTLRSGIDVRTNKIFWYQVKPGSPPQHLLTFQSDSDKQQGSGVPSRFSGSKDASANAGILIISGLQSEDEADYYCLIWHTSGWVFGGGTQLTVLG

SEQ ID NO: 242 - protein, 9 aa, synthetic construct
  REGION 1..9: note = Description of Artificial Sequence: Synthetic peptide
SGIDVRTNK

SEQ ID NO: 243 - protein, 7 aa, synthetic construct
  REGION 1..7: note = Description of Artificial Sequence: Synthetic peptide
FQSDSDK

SEQ ID NO: 244 - protein, 9 aa, synthetic construct
  REGION 1..9: note = Description of Artificial Sequence: Synthetic peptide
LIWHTSGWV

SEQ ID NO: 245 - protein, 221 aa, synthetic construct
  REGION 1..221: note = Description of Artificial Sequence: Synthetic polypeptide
QAVLTQPASLSASPGASASLTCTLRSGIDVRTNKIFWYQVKPGSPPQHLLTFQSDSDKQQGSGVPSRFSGSKDASANAGILIISGLQSEDEADYYCLIWHTSGWVFGGGTQLTVLGQPKAAPSVTLFPPSSEELQANKATLVCLISDFYPGAVTVAWKADSSPVKAGVETTTPSKQSNNKYAASSYLSLTPEQWKSHRSYSCQVTHEGSTVEKTVAPTECS

SEQ ID NO: 246 - protein, 124 aa, synthetic construct
  REGION 1..124: note = Description of Artificial Sequence: Synthetic polypeptide
EVQLVQSGAEVKKPGASVKVSCKVSGYTLTELSMHWVRQAPGKGLEWMGGFDPEDGETIYAQKFQGRVTMTEDTSTDTAYMELSSLRSEDTAVYYCATGPAAAGVGYYYYMDVWGKGTTVTVSS

SEQ ID NO: 247 - protein, 8 aa, synthetic construct
  REGION 1..8: note = Description of Artificial Sequence: Synthetic peptide
GYTLTELS

SEQ ID NO: 248 - protein, 8 aa, synthetic construct
  REGION 1..8: note = Description of Artificial Sequence: Synthetic peptide
FDPEDGET

SEQ ID NO: 249 - protein, 17 aa, synthetic construct
  REGION 1..17: note = Description of Artificial Sequence: Synthetic peptide
ATGPAAAGVGYYYYMDV

SEQ ID NO: 250 - protein, 454 aa, synthetic construct
  REGION 1..454: note = Description of Artificial Sequence: Synthetic polypeptide
EVQLVQSGAEVKKPGASVKVSCKVSGYTLTELSMHWVRQAPGKGLEWMGGFDPEDGETIYAQKFQGRVTMTEDTSTDTAYMELSSLRSEDTAVYYCATGPAAAGVGYYYYMDVWGKGTTVTVSSASTKGPSVFPLAPSSKSTSGGTAALGCLVKDYFPEPVTVSWNSGALTSGVHTFPAVLQSSGLYSLSSVVTVPSSSLGTQTYICNVNHKPSNTKVDKKVEPKSCDKTHTCPPCPAPELLGGPSVFLFPPKPKDTLMISRTPEVTCVVVDVSHEDPEVKFNWYVDGVEVHNAKTKPREEQYNSTYRVVSVLTVLHQDWLNGKEYKCKVSNKALPAPIEKTISKAKGQPREPQVYTLPPSREEMTKNQVSLTCLVKGFYPSDIAVEWESNGQPENNYKTTPPVLDSDGSFFLYSKLTVDKSRWQQGNVFSCSVMHEALHNHYTQKSLSLSPGK

SEQ ID NO: 251 - protein, 113 aa, synthetic construct
  REGION 1..113: note = Description of Artificial Sequence: Synthetic polypeptide
DVVMTQSPLSLPVTPGEPASISCRSSQSLLYRNGYNYLDWYLQKPGQSPQLLIYLGSNRASGVPDRFSGSGSGTDFTLKISRVEAEDVGVYYCMQALQTPPTFGQGTKVEIKR

SEQ ID NO: 252 - protein, 11 aa, synthetic construct
  REGION 1..11: note = Description of Artificial Sequence: Synthetic peptide
QSLLYRNGYNY

SEQ ID NO: 253 - skipped

SEQ ID NO: 254 - protein, 9 aa, synthetic construct
  REGION 1..9: note = Description of Artificial Sequence: Synthetic peptide
MQALQTPPT

SEQ ID NO: 255 - protein, 219 aa, synthetic construct
  REGION 1..219: note = Description of Artificial Sequence: Synthetic polypeptide
DVVMTQSPLSLPVTPGEPASISCRSSQSLLYRNGYNYLDWYLQKPGQSPQLLIYLGSNRASGVPDRFSGSGSGTDFTLKISRVEAEDVGVYYCMQALQTPPTFGQGTKVEIKRTVAAPSVFIFPPSDEQLKSGTASVVCLLNNFYPREAKVQWKVDNALQSGNSQESVTEQDSKDSTYSLSSTLTLSKADYEKHKVYACEVTHQGLSSPVTKSFNRGEC

SEQ ID NO: 256 - protein, 127 aa, synthetic construct
  REGION 1..127: note = Description of Artificial Sequence: Synthetic polypeptide
EVQLVETGGGLIQPGRSLRLSCAASGFTFSSYAMHWVRQAPGKGLEWVAVISYDGSNKYYADSVKGRFTISRDNSKNTLYLQMNSLRAEDTAVYYCARDVMVYCSSTSCYFYGMDVWGQGTTVTVSS

SEQ ID NO: 257 - protein, 8 aa, synthetic construct
  REGION 1..8: note = Description of Artificial Sequence: Synthetic peptide
GFTFSSYA

SEQ ID NO: 258 - protein, 8 aa, synthetic construct
  REGION 1..8: note = Description of Artificial Sequence: Synthetic peptide
ISYDGSNK

SEQ ID NO: 259 - protein, 20 aa, synthetic construct
  REGION 1..20: note = Description of Artificial Sequence: Synthetic peptide
ARDVMVYCSSTSCYFYGMDV

SEQ ID NO: 260 - protein, 457 aa, synthetic construct
  REGION 1..457: note = Description of Artificial Sequence: Synthetic polypeptide
EVQLVETGGGLIQPGRSLRLSCAASGFTFSSYAMHWVRQAPGKGLEWVAVISYDGSNKYYADSVKGRFTISRDNSKNTLYLQMNSLRAEDTAVYYCARDVMVYCSSTSCYFYGMDVWGQGTTVTVSSASTKGPSVFPLAPSSKSTSGGTAALGCLVKDYFPEPVTVSWNSGALTSGVHTFPAVLQSSGLYSLSSVVTVPSSSLGTQTYICNVNHKPSNTKVDKKVEPKSCDKTHTCPPCPAPELLGGPSVFLFPPKPKDTLMISRTPEVTCVVVDVSHEDPEVKFNWYVDGVEVHNAKTKPREEQYNSTYRVVSVLTVLHQDWLNGKEYKCKVSNKALPAPIEKTISKAKGQPREPQVYTLPPSREEMTKNQVSLTCLVKGFYPSDIAVEWESNGQPENNYKTTPPVLDSDGSFFLYSKLTVDKSRWQQGNVFSCSVMHEALHNHYTQKSLSLSPGK

SEQ ID NO: 261 - protein, 108 aa, synthetic construct
  REGION 1..108: note = Description of Artificial Sequence: Synthetic polypeptide
DIQMTQSPSSLSASVGDRVTVTCQASQDIRDYLNWYQKKPGKAPKLLIYDASNLEAGVPSRFSGSGSGTDFTFTISGLQPEDVATYYCQQFENLPITFGQGTRLEIKR

SEQ ID NO: 262 - protein, 6 aa, synthetic construct
  REGION 1..6: note = Description of Artificial Sequence: Synthetic peptide
QDIRDY

SEQ ID NO: 263 - skipped

SEQ ID NO: 264 - protein, 9 aa, synthetic construct
  REGION 1..9: note = Description of Artificial Sequence: Synthetic peptide
QQFENLPIT

SEQ ID NO: 265 - protein, 214 aa, synthetic construct
  REGION 1..214: note = Description of Artificial Sequence: Synthetic polypeptide
DIQMTQSPSSLSASVGDRVTVTCQASQDIRDYLNWYQKKPGKAPKLLIYDASNLEAGVPSRFSGSGSGTDFTFTISGLQPEDVATYYCQQFENLPITFGQGTRLEIKRTVAAPSVFIFPPSDEQLKSGTASVVCLLNNFYPREAKVQWKVDNALQSGNSQESVTEQDSKDSTYSLSSTLTLSKADYEKHKVYACEVTHQGLSSPVTKSFNRGEC

SEQ ID NO: 266 - protein, 125 aa, synthetic construct
  REGION 1..125: note = Description of Artificial Sequence: Synthetic polypeptide
QVQLVQSGAEVKKPGASVKVSCKVSGYTLTELSMHWVRQAPGKGLEWMGGFDPEDGETIYAQKFQGRVTMTEDTSTDTAYMELSSLRSEDTAVYYCATGGYSSGFNYYYYYMDVWGKGTTVTVSS

SEQ ID NO: 267 - protein, 8 aa, synthetic construct
  REGION 1..8: note = Description of Artificial Sequence: Synthetic peptide
GYTLTELS

SEQ ID NO: 268 - protein, 8 aa, synthetic construct
  REGION 1..8: note = Description of Artificial Sequence: Synthetic peptide
FDPEDGET

SEQ ID NO: 269 - protein, 18 aa, synthetic construct
  REGION 1..18: note = Description of Artificial Sequence: Synthetic peptide
ATGGYSSGFNYYYYYMDV

SEQ ID NO: 270 - protein, 455 aa, synthetic construct
  REGION 1..455: note = Description of Artificial Sequence: Synthetic polypeptide
QVQLVQSGAEVKKPGASVKVSCKVSGYTLTELSMHWVRQAPGKGLEWMGGFDPEDGETIYAQKFQGRVTMTEDTSTDTAYMELSSLRSEDTAVYYCATGGYSSGFNYYYYYMDVWGKGTTVTVSSASTKGPSVFPLAPSSKSTSGGTAALGCLVKDYFPEPVTVSWNSGALTSGVHTFPAVLQSSGLYSLSSVVTVPSSSLGTQTYICNVNHKPSNTKVDKKVEPKSCDKTHTCPPCPAPELLGGPSVFLFPPKPKDTLMISRTPEVTCVVVDVSHEDPEVKFNWYVDGVEVHNAKTKPREEQYNSTYRVVSVLTVLHQDWLNGKEYKCKVSNKALPAPIEKTISKAKGQPREPQVYTLPPSREEMTKNQVSLTCLVKGFYPSDIAVEWESNGQPENNYKTTPPVLDSDGSFFLYSKLTVDKSRWQQGNVFSCSVMHEALHNHYTQKSLSLSPGK

SEQ ID NO: 271 - protein, 113 aa, synthetic construct; identical to SEQ ID NO: 201
  REGION 1..113: note = Description of Artificial Sequence: Synthetic polypeptide

SEQ ID NO: 272 - protein, 11 aa, synthetic construct
  REGION 1..11: note = Description of Artificial Sequence: Synthetic peptide
QSLLYRNGNNY

SEQ ID NO: 273 - skipped

SEQ ID NO: 274 - protein, 9 aa, synthetic construct
  REGION 1..9: note = Description of Artificial Sequence: Synthetic peptide
MQALQTPPT

SEQ ID NO: 275 - protein, 219 aa, synthetic construct; identical to SEQ ID NO: 205
  REGION 1..219: note = Description of Artificial Sequence: Synthetic polypeptide

SEQ ID NO: 276 - protein, 121 aa, synthetic construct
  REGION 1..121: note = Description of Artificial Sequence: Synthetic polypeptide
EVQLVQSGAEVKKPGASVKVSCKVSGYTLTELSMHWVRQAPGKGLEWMGGFDPEDGETIYAQKFQGRVTMTEDTSTDTAYMELSSLRSEDTAVYYCATGVTTYYYYGMDVWGQGTTVTVSS

SEQ ID NO: 277 - protein, 8 aa, synthetic construct
  REGION 1..8: note = Description of Artificial Sequence: Synthetic peptide
GYTLTELS

SEQ ID NO: 278 - protein, 8 aa, synthetic construct
  REGION 1..8: note = Description of Artificial Sequence: Synthetic peptide
FDPEDGET

SEQ ID NO: 279 - protein, 14 aa, synthetic construct
  REGION 1..14: note = Description of Artificial Sequence: Synthetic peptide
ATGVTTYYYYGMDV

SEQ ID NO: 280 - protein, 451 aa, synthetic construct
  REGION 1..451: note = Description of Artificial Sequence: Synthetic polypeptide
EVQLVQSGAEVKKPGASVKVSCKVSGYTLTELSMHWVRQAPGKGLEWMGGFDPEDGETIYAQKFQGRVTMTEDTSTDTAYMELSSLRSEDTAVYYCATGVTTYYYYGMDVWGQGTTVTVSSASTKGPSVFPLAPSSKSTSGGTAALGCLVKDYFPEPVTVSWNSGALTSGVHTFPAVLQSSGLYSLSSVVTVPSSSLGTQTYICNVNHKPSNTKVDKKVEPKSCDKTHTCPPCPAPELLGGPSVFLFPPKPKDTLMISRTPEVTCVVVDVSHEDPEVKFNWYVDGVEVHNAKTKPREEQYNSTYRVVSVLTVLHQDWLNGKEYKCKVSNKALPAPIEKTISKAKGQPREPQVYTLPPSREEMTKNQVSLTCLVKGFYPSDIAVEWESNGQPENNYKTTPPVLDSDGSFFLYSKLTVDKSRWQQGNVFSCSVMHEALHNHYTQKSLSLSPGK

SEQ ID NO: 281 - protein, 113 aa, synthetic construct
  REGION 1..113: note = Description of Artificial Sequence: Synthetic polypeptide
DVVMTQSPLSLPVTPGEPASISCRSSQSLLYSNGNNFLDWYLQKPGQSPRLLISLGSNRASGVPDRFSGSGSGTDFTLKISRVEAEDVGIYYCMQALQTPPTFGQGTKVEIKR

SEQ ID NO: 282 - protein, 11 aa, synthetic construct
  REGION 1..11: note = Description of Artificial Sequence: Synthetic peptide
QSLLYSNGNNF

SEQ ID NO: 283 - skipped

SEQ ID NO: 284 - protein, 9 aa, synthetic construct
  REGION 1..9: note = Description of Artificial Sequence: Synthetic peptide
MQALQTPPT

SEQ ID NO: 285 - protein, 219 aa, synthetic construct
  REGION 1..219: note = Description of Artificial Sequence: Synthetic polypeptide
DVVMTQSPLSLPVTPGEPASISCRSSQSLLYSNGNNFLDWYLQKPGQSPRLLISLGSNRASGVPDRFSGSGSGTDFTLKISRVEAEDVGIYYCMQALQTPPTFGQGTKVEIKRTVAAPSVFIFPPSDEQLKSGTASVVCLLNNFYPREAKVQWKVDNALQSGNSQESVTEQDSKDSTYSLSSTLTLSKADYEKHKVYACEVTHQGLSSPVTKSFNRGEC

SEQ ID NO: 286 - protein, 121 aa, synthetic construct
  REGION 1..121: note = Description of Artificial Sequence: Synthetic polypeptide
QITLKESGGGVVQPGGSLRLSCAASGFTFSSYGMHWVRQAPGKGLEWVAFIRYDGSNKYYADSVKGRFTISRDNSKNTLYLQMNSLRAEDTAVYYCARDLFDFWWDGMDVWGQGTTVTVSS

SEQ ID NO: 287 - protein, 8 aa, synthetic construct
  REGION 1..8: note = Description of Artificial Sequence: Synthetic peptide
GFTFSSYG

SEQ ID NO: 288 - protein, 8 aa, synthetic construct
  REGION 1..8: note = Description of Artificial Sequence: Synthetic peptide
IRYDGSNK

SEQ ID NO: 289 - protein, 14 aa, synthetic construct
  REGION 1..14: note = Description of Artificial Sequence: Synthetic peptide
ARDLFDFWWDGMDV

SEQ ID NO: 290 - protein, 451 aa, synthetic construct
  REGION 1..451: note = Description of Artificial Sequence: Synthetic polypeptide
QITLKESGGGVVQPGGSLRLSCAASGFTFSSYGMHWVRQAPGKGLEWVAFIRYDGSNKYYADSVKGRFTISRDNSKNTLYLQMNSLRAEDTAVYYCARDLFDFWWDGMDVWGQGTTVTVSSASTKGPSVFPLAPSSKSTSGGTAALGCLVKDYFPEPVTVSWNSGALTSGVHTFPAVLQSSGLYSLSSVVTVPSSSLGTQTYICNVNHKPSNTKVDKKVEPKSCDKTHTCPPCPAPELLGGPSVFLFPPKPKDTLMISRTPEVTCVVVDVSHEDPEVKFNWYVDGVEVHNAKTKPREEQYNSTYRVVSVLTVLHQDWLNGKEYKCKVSNKALPAPIEKTISKAKGQPREPQVYTLPPSREEMTKNQVSLTCLVKGFYPSDIAVEWESNGQPENNYKTTPPVLDSDGSFFLYSKLTVDKSRWQQGNVFSCSVMHEALHNHYTQKSLSLSPGK

SEQ ID NO: 291 - protein, 110 aa, synthetic construct
  REGION 1..110: note = Description of Artificial Sequence: Synthetic polypeptide
EIVLTQSPGTLSLSPGEKATLSCRVSQSVSSMYLAWYQQKPGQAPRLLIYGASYRATGIPDRFSGSGSGTDFNLTISRLEPEDFAVYYCQQYVSSPMYTFGLGTKLEIKR

SEQ ID NO: 292 - protein, 7 aa, synthetic construct
  REGION 1..7: note = Description of Artificial Sequence: Synthetic peptide
QSVSSMY

SEQ ID NO: 293 - skipped

SEQ ID NO: 294 - protein, 10 aa, synthetic construct
  REGION 1..10: note = Description of Artificial Sequence: Synthetic peptide
QQYVSSPMYT

SEQ ID NO: 295 - protein, 216 aa, synthetic construct
  REGION 1..216: note = Description of Artificial Sequence: Synthetic polypeptide
EIVLTQSPGTLSLSPGEKATLSCRVSQSVSSMYLAWYQQKPGQAPRLLIYGASYRATGIPDRFSGSGSGTDFNLTISRLEPEDFAVYYCQQYVSSPMYTFGLGTKLEIKRTVAAPSVFIFPPSDEQLKSGTASVVCLLNNFYPREAKVQWKVDNALQSGNSQESVTEQDSKDSTYSLSSTLTLSKADYEKHKVYACEVTHQGLSSPVTKSFNRGEC

SEQ ID NO: 296 - protein, 122 aa, synthetic construct
  REGION 1..122: note = Description of Artificial Sequence: Synthetic polypeptide
QVQLVQSGAEVKKPGSSVKVSCKASGGTFNNYGISWVRQAPGKGLEWMGQIIPLFGTTKYAQKFQGRVTIAADEPTSTAYMELGSLRSEDTAIYYCARDRMAADGMAVFDYWGQGTLVTVSS

SEQ ID NO: 297 - protein, 8 aa, synthetic construct
  REGION 1..8: note = Description of Artificial Sequence: Synthetic peptide
GGTFNNYG

SEQ ID NO: 298 - protein, 8 aa, synthetic construct
  REGION 1..8: note = Description of Artificial Sequence: Synthetic peptide
IIPLFGTT

SEQ ID NO: 299 - protein, 15 aa, synthetic construct
  REGION 1..15: note = Description of Artificial Sequence: Synthetic peptide
ARDRMAADGMAVFDY

SEQ ID NO: 300 - protein, 452 aa, synthetic construct
  REGION 1..452: note = Description of Artificial Sequence: Synthetic polypeptide
QVQLVQSGAEVKKPGSSVKVSCKASGGTFNNYGISWVRQAPGKGLEWMGQIIPLFGTTKYAQKFQGRVTIAADEPTSTAYMELGSLRSEDTAIYYCARDRMAADGMAVFDYWGQGTLVTVSSASTKGPSVFPLAPSSKSTSGGTAALGCLVKDYFPEPVTVSWNSGALTSGVHTFPAVLQSSGLYSLSSVVTVPSSSLGTQTYICNVNHKPSNTKVDKKVEPKSCDKTHTCPPCPAPELLGGPSVFLFPPKPKDTLMISRTPEVTCVVVDVSHEDPEVKFNWYVDGVEVHNAKTKPREEQYNSTYRVVSVLTVLHQDWLNGKEYKCKVSNKALPAPIEKTISKAKGQPREPQVYTLPPSREEMTKNQVSLTCLVKGFYPSDIAVEWESNGQPENNYKTTPPVLDSDGSFFLYSKLTVDKSRWQQGNVFSCSVMHEALHNHYTQKSLSLSPGK

SEQ ID NO: 301 - protein, 111 aa, synthetic construct
  REGION 1..111: note = Description of Artificial Sequence: Synthetic polypeptide
QSVLTQPPSVSGTPGQKVIISCSGSSSNIGRHFVFWYQQLPGTAPKLLIYKNDERPSGVPDRFSGSKSGTSASLAVSGLRSEDEADYYCSSWDAALNGVVFGGGTKLTVLG

SEQ ID NO: 302 - protein, 8 aa, synthetic construct
  REGION 1..8: note = Description of Artificial Sequence: Synthetic peptide
SSNIGRHF

SEQ ID NO: 303 - skipped

SEQ ID NO: 304 - protein, 11 aa, synthetic construct
  REGION 1..11: note = Description of Artificial Sequence: Synthetic peptide
SSWDAALNGVV

SEQ ID NO: 305 - protein, 216 aa, synthetic construct
  REGION 1..216: note = Description of Artificial Sequence: Synthetic polypeptide
QSVLTQPPSVSGTPGQKVIISCSGSSSNIGRHFVFWYQQLPGTAPKLLIYKNDERPSGVPDRFSGSKSGTSASLAVSGLRSEDEADYYCSSWDAALNGVVFGGGTKLTVLGQPKAAPSVTLFPPSSEELQANKATLVCLISDFYPGAVTVAWKADSSPVKAGVETTTPSKQSNNKYAASSYLSLTPEQWKSHRSYSCQVTHEGSTVEKTVAPTECS

SEQ ID NO: 306 - protein, 126 aa, synthetic construct
  REGION 1..126: note = Description of Artificial Sequence: Synthetic polypeptide
EVQLVQSGAEVKKPGASVKVSCKVSGYTLTELSMHWVRQAPGKGLEWMGGFDPEDGETIYAQKFQGRVTMTEDTSTDTAYMELSSLRSEDTAVYYCATEVPMVRGARRYYYYMDVWGKGTTVTVSS

SEQ ID NO: 307 - protein, 8 aa, synthetic construct
  REGION 1..8: note = Description of Artificial Sequence: Synthetic peptide
GYTLTELS

SEQ ID NO: 308 - protein, 8 aa, synthetic construct
  REGION 1..8: note = Description of Artificial Sequence: Synthetic peptide
FDPEDGET

SEQ ID NO: 309 - protein, 19 aa, synthetic construct
  REGION 1..19: note = Description of Artificial Sequence: Synthetic peptide
ATEVPMVRGARRYYYYMDV

SEQ ID NO: 310 - protein, 456 aa, synthetic construct
  REGION 1..456: note = Description of Artificial Sequence: Synthetic polypeptide
EVQLVQSGAEVKKPGASVKVSCKVSGYTLTELSMHWVRQAPGKGLEWMGGFDPEDGETIYAQKFQGRVTMTEDTSTDTAYMELSSLRSEDTAVYYCATEVPMVRGARRYYYYMDVWGKGTTVTVSSASTKGPSVFPLAPSSKSTSGGTAALGCLVKDYFPEPVTVSWNSGALTSGVHTFPAVLQSSGLYSLSSVVTVPSSSLGTQTYICNVNHKPSNTKVDKKVEPKSCDKTHTCPPCPAPELLGGPSVFLFPPKPKDTLMISRTPEVTCVVVDVSHEDPEVKFNWYVDGVEVHNAKTKPREEQYNSTYRVVSVLTVLHQDWLNGKEYKCKVSNKALPAPIEKTISKAKGQPREPQVYTLPPSREEMTKNQVSLTCLVKGFYPSDIAVEWESNGQPENNYKTTPPVLDSDGSFFLYSKLTVDKSRWQQGNVFSCSVMHEALHNHYTQKSLSLSPGK

SEQ ID NO: 311 - protein, 113 aa, synthetic construct
  REGION 1..113: note = Description of Artificial Sequence: Synthetic polypeptide
DVVMTQSPLFLAVTPGEPASISCRSSQTLLYINENNYLDWYVQKPGQSPQLLIYLGSTRASGVPDRFSGGGSGTDFTLTISRVEAEDVGLYYCMQGLQTPPTFGQGTRLEIKR

SEQ ID NO: 312 - protein, 11 aa, synthetic construct
  REGION 1..11: note = Description of Artificial Sequence: Synthetic peptide
QTLLYINENNY

SEQ ID NO: 313 - skipped

SEQ ID NO: 314 - protein, 9 aa, synthetic construct
  REGION 1..9: note = Description of Artificial Sequence: Synthetic peptide
MQGLQTPPT

SEQ ID NO: 315 - protein, 219 aa, synthetic construct
  REGION 1..219: note = Description of Artificial Sequence: Synthetic polypeptide
DVVMTQSPLFLAVTPGEPASISCRSSQTLLYINENNYLDWYVQKPGQSPQLLIYLGSTRASGVPDRFSGGGSGTDFTLTISRVEAEDVGLYYCMQGLQTPPTFGQGTRLEIKRTVAAPSVFIFPPSDEQLKSGTASVVCLLNNFYPREAKVQWKVDNALQSGNSQESVTEQDSKDSTYSLSSTLTLSKADYEKHKVYACEVTHQGLSSPVTKSFNRGEC

SEQ ID NO: 316 - protein, 123 aa, synthetic construct
  REGION 1..123: note = Description of Artificial Sequence: Synthetic polypeptide
QVQLQESGPGLVKSSETLSLTCSVSGGSISNSNYYWGWIRQPPGKGLEWIGGIYYSGSTYYNPSLESRVTISEDTSKNQISLKLSSVTAADTAVYYCARGAWELSLGDWFDPWGPGTLVTVSS

SEQ ID NO: 317 - protein, 10 aa, synthetic construct
  REGION 1..10: note = Description of Artificial Sequence: Synthetic peptide
GGSISNSNYY

SEQ ID NO: 318 - protein, 7 aa, synthetic construct
  REGION 1..7: note = Description of Artificial Sequence: Synthetic peptide
IYYSGST

SEQ ID NO: 319 - protein, 15 aa, synthetic construct
  REGION 1..15: note = Description of Artificial Sequence: Synthetic peptide
ARGAWELSLGDWFDP

SEQ ID NO: 320 - protein, 453 aa, synthetic construct
  REGION 1..453: note = Description of Artificial Sequence: Synthetic polypeptide
QVQLQESGPGLVKSSETLSLTCSVSGGSISNSNYYWGWIRQPPGKGLEWIGGIYYSGSTYYNPSLESRVTISEDTSKNQISLKLSSVTAADTAVYYCARGAWELSLGDWFDPWGPGTLVTVSSASTKGPSVFPLAPSSKSTSGGTAALGCLVKDYFPEPVTVSWNSGALTSGVHTFPAVLQSSGLYSLSSVVTVPSSSLGTQTYICNVNHKPSNTKVDKKVEPKSCDKTHTCPPCPAPELLGGPSVFLFPPKPKDTLMISRTPEVTCVVVDVSHEDPEVKFNWYVDGVEVHNAKTKPREEQYNSTYRVVSVLTVLHQDWLNGKEYKCKVSNKALPAPIEKTISKAKGQPREPQVYTLPPSREEMTKNQVSLTCLVKGFYPSDIAVEWESNGQPENNYKTTPPVLDSDGSFFLYSKLTVDKSRWQQGNVFSCSVMHEALHNHYTQKSLSLSPGK

SEQ ID NO: 321 - protein, 113 aa, synthetic construct
  REGION 1..113: note = Description of Artificial Sequence: Synthetic polypeptide
QSVLTQPPSVSGAPGQRVTISCTGSSSNIGAGYDIQWYQQLPGTAPKLLIYGNNNRPSGVPDRFSGSRSGTSASLAITGLQAEDEADYYCQSYDSSLSVYVVFGGGTQLTVLG

SEQ ID NO: 322 - protein, 9 aa, synthetic construct
  REGION 1..9: note = Description of Artificial Sequence: Synthetic peptide
SSNIGAGYD

SEQ ID NO: 323 - skipped

SEQ ID NO: 324 - protein, 12 aa, synthetic construct
  REGION 1..12: note = Description of Artificial Sequence: Synthetic peptide
QSYDSSLSVYVV

SEQ ID NO: 325 - protein, 218 aa, synthetic construct
  REGION 1..218: note = Description of Artificial Sequence: Synthetic polypeptide
QSVLTQPPSVSGAPGQRVTISCTGSSSNIGAGYDIQWYQQLPGTAPKLLIYGNNNRPSGVPDRFSGSRSGTSASLAITGLQAEDEADYYCQSYDSSLSVYVVFGGGTQLTVLGQPKAAPSVTLFPPSSEELQANKATLVCLISDFYPGAVTVAWKADSSPVKAGVETTTPSKQSNNKYAASSYLSLTPEQWKSHRSYSCQVTHEGSTVEKTVAPTECS

SEQ ID NO: 326 - protein, 122 aa, synthetic construct
  REGION 1..122: note = Description of Artificial Sequence: Synthetic polypeptide
EVQLVESGGGVVKPGGSLRLSCAASGFTFGTSSMNWVRQAPGKGLEWVAVISFDGTEIHYADSVKGRFTISRDNSKSTVFLQMNSLRPDDTALYYCAKGSGNIYFYSGMDVWGQGTTVTVSS

SEQ ID NO: 327 - protein, 8 aa, synthetic construct
  REGION 1..8: note = Description of Artificial Sequence: Synthetic peptide
GFTFGTSS

SEQ ID NO: 328 - protein, 8 aa, synthetic construct
  REGION 1..8: note = Description of Artificial Sequence: Synthetic peptide
ISFDGTEI

SEQ ID NO: 329 - protein, 15 aa, synthetic construct
  REGION 1..15: note = Description of Artificial Sequence: Synthetic peptide
AKGSGNIYFYSGMDV

SEQ ID NO: 330 - protein, 452 aa, synthetic construct
  REGION 1..452: note = Description of Artificial Sequence: Synthetic polypeptide
EVQLVESGGGVVKPGGSLRLSCAASGFTFGTSSMNWVRQAPGKGLEWVAVISFDGTEIHYADSVKGRFTISRDNSKSTVFLQMNSLRPDDTALYYCAKGSGNIYFYSGMDVWGQGTTVTVSSASTKGPSVFPLAPSSKSTSGGTAALGCLVKDYFPEPVTVSWNSGALTSGVHTFPAVLQSSGLYSLSSVVTVPSSSLGTQTYICNVNHKPSNTKVDKKVEPKSCDKTHTCPPCPAPELLGGPSVFLFPPKPKDTLMISRTPEVTCVVVDVSHEDPEVKFNWYVDGVEVHNAKTKPREEQYNSTYRVVSVLTVLHQDWLNGKEYKCKVSNKALPAPIEKTISKAKGQPREPQVYTLPPSREEMTKNQVSLTCLVKGFYPSDIAVEWESNGQPENNYKTTPPVLDSDGSFFLYSKLTVDKSRWQQGNVFSCSVMHEALHNHYTQKSLSLSPGK

SEQ ID NO: 331 - protein, 108 aa, synthetic construct
  REGION 1..108: note = Description of Artificial Sequence: Synthetic polypeptide
DIQMTQSPSTLSASVGDRVTITCRAGQSISGWLAWFQQKPGKAPNLLIYETSTLESGVPSRFSGSGSGTEYTLTISSLQPDDFATYYCQQYYSYPLTFGQGTKVEIKR

SEQ ID NO: 332 - protein, 6 aa, synthetic construct
  REGION 1..6: note = Description of Artificial Sequence: Synthetic peptide
QSISGW

SEQ ID NO: 333 - skipped

SEQ ID NO: 334 - protein, 9 aa, synthetic construct
  REGION 1..9: note = Description of Artificial Sequence: Synthetic peptide
QQYYSYPLT

SEQ ID NO: 335 - protein, 214 aa, synthetic construct
  REGION 1..214: note = Description of Artificial Sequence: Synthetic polypeptide
DIQMTQSPSTLSASVGDRVTITCRAGQSISGWLAWFQQKPGKAPNLLIYETSTLESGVPSRFSGSGSGTEYTLTISSLQPDDFATYYCQQYYSYPLTFGQGTKVEIKRTVAAPSVFIFPPSDEQLKSGTASVVCLLNNFYPREAKVQWKVDNALQSGNSQESVTEQDSKDSTYSLSSTLTLSKADYEKHKVYACEVTHQGLSSPVTKSFNRGEC

SEQ ID NO: 336 - protein, 126 aa, synthetic construct
  REGION 1..126: note = Description of Artificial Sequence: Synthetic polypeptide
EVQLVQSGAEVKKPGASVKVSCKVSGYTLTELSMHWVRQAPGKGLEWMGGFDPEDGETIYAQKFQGRVTMTEDTSTDTAYMELSSLRSEDTAVYYCATGVPAAIGVYYYYYYMDVWGKGTTVTVSS

SEQ ID NO: 337 - protein, 8 aa, synthetic construct
  REGION 1..8: note = Description of Artificial Sequence: Synthetic peptide
GYTLTELS

SEQ ID NO: 338 - protein, 8 aa, synthetic construct
  REGION 1..8: note = Description of Artificial Sequence: Synthetic peptide
FDPEDGET

SEQ ID NO: 339 - protein, 19 aa, synthetic construct
  REGION 1..19: note = Description of Artificial Sequence: Synthetic peptide
ATGVPAAIGVYYYYYYMDV

SEQ ID NO: 340 - protein, 456 aa, synthetic construct
  REGION 1..456: note = Description of Artificial Sequence: Synthetic polypeptide
EVQLVQSGAEVKKPGASVKVSCKVSGYTLTELSMHWVRQAPGKGLEWMGGFDPEDGETIYAQKFQGRVTMTEDTSTDTAYMELSSLRSEDTAVYYCATGVPAAIGVYYYYYYMDVWGKGTTVTVSSASTKGPSVFPLAPSSKSTSGGTAALGCLVKDYFPEPVTVSWNSGALTSGVHTFPAVLQSSGLYSLSSVVTVPSSSLGTQTYICNVNHKPSNTKVDKKVEPKSCDKTHTCPPCPAPELLGGPSVFLFPPKPKDTLMISRTPEVTCVVVDVSHEDPEVKFNWYVDGVEVHNAKTKPREEQYNSTYRVVSVLTVLHQDWLNGKEYKCKVSNKALPAPIEKTISKAKGQPREPQVYTLPPSREEMTKNQVSLTCLVKGFYPSDIAVEWESNGQPENNYKTTPPVLDSDGSFFLYSKLTVDKSRWQQGNVFSCSVMHEALHNHYTQKSLSLSPGK

SEQ ID NO: 341 - protein, 113 aa, synthetic construct
  REGION 1..113: note = Description of Artificial Sequence: Synthetic polypeptide
DVVMTQSPLSLPVTPGEPASISCRSSQSLLYSNGYNYLDWYLQKPGQSPQLLISLGSNRASGVPDRFSGSGSGTDFTLKISRVEAEDVGVYYCMQALQSPVTFGGGTKVEIKR

SEQ ID NO: 342 - protein, 11 aa, synthetic construct
  REGION 1..11: note = Description of Artificial Sequence: Synthetic peptide
QSLLYSNGYNY

SEQ ID NO: 343 - skipped

SEQ ID NO: 344 - protein, 9 aa, synthetic construct
  REGION 1..9: note = Description of Artificial Sequence: Synthetic peptide
MQALQSPVT

SEQ ID NO: 345 - protein, 219 aa, synthetic construct
  REGION 1..219: note = Description of Artificial Sequence: Synthetic polypeptide
DVVMTQSPLSLPVTPGEPASISCRSSQSLLYSNGYNYLDWYLQKPGQSPQLLISLGSNRASGVPDRFSGSGSGTDFTLKISRVEAEDVGVYYCMQALQSPVTFGGGTKVEIKRTVAAPSVFIFPPSDEQLKSGTASVVCLLNNFYPREAKVQWKVDNALQSGNSQESVTEQDSKDSTYSLSSTLTLSKADYEKHKVYACEVTHQGLSSPVTKSFNRGEC

SEQ ID NO: 346 - protein, 127 aa, synthetic construct
  REGION 1..127: note = Description of Artificial Sequence: Synthetic polypeptide
EVQLVQSGAEVKKPGASVKVSCKVSGYTLTELSMHWVRQAPGKGLEWMGGFDPEDGETIYAQKFQGRVTMTEDTSTDTAYMELSSLRSEDTAVYYCATDSRDGPAARGGYYYYMDVWGQGTTVTVSS

SEQ ID NO: 347 - protein, 8 aa, synthetic construct
  REGION 1..8: note = Description of Artificial Sequence: Synthetic peptide
GYTLTELS

SEQ ID NO: 348 - protein, 8 aa, synthetic construct
  REGION 1..8: note = Description of Artificial Sequence: Synthetic peptide
FDPEDGET

SEQ ID NO: 349 - protein, 20 aa, synthetic construct
  REGION 1..20: note = Description of Artificial Sequence: Synthetic peptide
ATDSRDGPAARGGYYYYMDV

SEQ ID NO: 350 - protein, 457 aa, synthetic construct
  REGION 1..457: note = Description of Artificial Sequence: Synthetic polypeptide
EVQLVQSGAEVKKPGASVKVSCKVSGYTLTELSMHWVRQAPGKGLEWMGGFDPEDGETIYAQKFQGRVTMTEDTSTDTAYMELSSLRSEDTAVYYCATDSRDGPAARGGYYYYMDVWGQGTTVTVSSASTKGPSVFPLAPSSKSTSGGTAALGCLVKDYFPEPVTVSWNSGALTSGVHTFPAVLQSSGLYSLSSVVTVPSSSLGTQTYICNVNHKPSNTKVDKKVEPKSCDKTHTCPPCPAPELLGGPSVFLFPPKPKDTLMISRTPEVTCVVVDVSHEDPEVKFNWYVDGVEVHNAKTKPREEQYNSTYRVVSVLTVLHQDWLNGKEYKCKVSNKALPAPIEKTISKAKGQPREPQVYTLPPSREEMTKNQVSLTCLVKGFYPSDIAVEWESNGQPENNYKTTPPVLDSDGSFFLYSKLTVDKSRWQQGNVFSCSVMHEALHNHYTQKSLSLSPGK

SEQ ID NO: 351 - protein, 113 aa, synthetic construct
  REGION 1..113: note = Description of Artificial Sequence: Synthetic polypeptide
DVVMTQSPLSLPVTLGQPASISCRSSQSLLYINGYNYLDWYLQKPGQSPQLLIYLGSNRASGVPDRFSGSGSGTDFTLKISRVEAEDVGVYYCMQALQTPPTFGQGTKVEIKR

SEQ ID NO: 352 - protein, 11 aa, synthetic construct
  REGION 1..11: note = Description of Artificial Sequence: Synthetic peptide
QSLLYINGYNY

SEQ ID NO: 353 - skipped

SEQ ID NO: 354 - protein, 9 aa, synthetic construct
  REGION 1..9: note = Description of Artificial Sequence: Synthetic peptide
MQALQTPPT

SEQ ID NO: 355 - protein, 219 aa, synthetic construct
  REGION 1..219: note = Description of Artificial Sequence: Synthetic polypeptide
DVVMTQSPLSLPVTLGQPASISCRSSQSLLYINGYNYLDWYLQKPGQSPQLLIYLGSNRASGVPDRFSGSGSGTDFTLKISRVEAEDVGVYYCMQALQTPPTFGQGTKVEIKRTVAAPSVFIFPPSDEQLKSGTASVVCLLNNFYPREAKVQWKVDNALQSGNSQESVTEQDSKDSTYSLSSTLTLSKADYEKHKVYACEVTHQGLSSPVTKSFNRGEC

SEQ ID NO: 356 - protein, 127 aa, synthetic construct
  REGION 1..127: note = Description of Artificial Sequence: Synthetic polypeptide
EVQLVQSGAEVKKPGSSVKVSCKASGGTFSSYAISWVRQAPGQGLEWMGGIIPIFGTANYAQKFQGRVTITADESTSTAYMELSSLRSEDTAVYYCARDAYYYDSSGYYNPDAFDIWGQGTMVTVSS

SEQ ID NO: 357 - protein, 8 aa, synthetic construct
  REGION 1..8: note = Description of Artificial Sequence: Synthetic peptide
GGTFSSYA

SEQ ID NO: 358 - protein, 8 aa, synthetic construct
  REGION 1..8: note = Description of Artificial Sequence: Synthetic peptide
IIPIFGTA

SEQ ID NO: 359 - protein, 20 aa, synthetic construct
  REGION 1..20: note = Description of Artificial Sequence: Synthetic peptide
ARDAYYYDSSGYYNPDAFDI

SEQ ID NO: 360 - protein, 457 aa, synthetic construct
  REGION 1..457: note = Description of Artificial Sequence: Synthetic polypeptide
EVQLVQSGAEVKKPGSSVKVSCKASGGTFSSYAISWVRQAPGQGLEWMGGIIPIFGTANYAQKFQGRVTITADESTSTAYMELSSLRSEDTAVYYCARDAYYYDSSGYYNPDAFDIWGQGTMVTVSSASTKGPSVFPLAPSSKSTSGGTAALGCLVKDYFPEPVTVSWNSGALTSGVHTFPAVLQSSGLYSLSSVVTVPSSSLGTQTYICNVNHKPSNTKVDKKVEPKSCDKTHTCPPCPAPELLGGPSVFLFPPKPKDTLMISRTPEVTCVVVDVSHEDPEVKFNWYVDGVEVHNAKTKPREEQYNSTYRVVSVLTVLHQDWLNGKEYKCKVSNKALPAPIEKTISKAKGQPREPQVYTLPPSREEMTKNQVSLTCLVKGFYPSDIAVEWESNGQPENNYKTTPPVLDSDGSFFLYSKLTVDKSRWQQGNVFSCSVMHEALHNHYTQKSLSLSPGK

SEQ ID NO: 361 - protein, 113 aa, synthetic construct
  REGION 1..113: note = Description of Artificial Sequence: Synthetic polypeptide
DVVMTQSPLSLPVTPGEPASISCRSSQSLLHSNGYNYLDWYLQKPGQSPQLLIYLGSSRASGVPDRFSGSVSGTDFTLKISRVEAEDVGVYYCMQGLQTPRTFGRGTKLEIKR

SEQ ID NO: 362 - protein, 11 aa, synthetic construct
  REGION 1..11: note = Description of Artificial Sequence: Synthetic peptide
QSLLHSNGYNY

SEQ ID NO: 363 - skipped

SEQ ID NO: 364 - protein, 9 aa, synthetic construct
  REGION 1..9: note = Description of Artificial Sequence: Synthetic peptide
MQGLQTPRT

SEQ ID NO: 365 - protein, 219 aa, synthetic construct
  REGION 1..219: note = Description of Artificial Sequence: Synthetic polypeptide
DVVMTQSPLSLPVTPGEPASISCRSSQSLLHSNGYNYLDWYLQKPGQSPQLLIYLGSSRASGVPDRFSGSVSGTDFTLKISRVEAEDVGVYYCMQGLQTPRTFGRGTKLEIKRTVAAPSVFIFPPSDEQLKSGTASVVCLLNNFYPREAKVQWKVDNALQSGNSQESVTEQDSKDSTYSLSSTLTLSKADYEKHKVYACEVTHQGLSSPVTKSFNRGEC

SEQ ID NO: 366 - protein, 129 aa, synthetic construct
  REGION 1..129: note = Description of Artificial Sequence: Synthetic polypeptide
QVQLVQSGAEVKKPGSSVKVSCKASGGTFSSSAISWVRQAPGQGFEWMGGIIPIYGITDYAQKFQGRVTITTDESTSTAYMELSSLTSEDTAVYYCARDDTARRVRGVPYYYYYAMDVWGQGTTVTVSS

SEQ ID NO: 367 - protein, 8 aa, synthetic construct
  REGION 1..8: note = Description of Artificial Sequence: Synthetic peptide
GGTFSSSA

SEQ ID NO: 368 - protein, 8 aa, synthetic construct
  REGION 1..8: note = Description of Artificial Sequence: Synthetic peptide
IIPIYGIT

SEQ ID NO: 369 - protein, 22 aa, synthetic construct
  REGION 1..22: note = Description of Artificial Sequence: Synthetic peptide
ARDDTARRVRGVPYYYYYAMDV

SEQ ID NO: 370 - protein, 459 aa, synthetic construct
  REGION 1..459: note = Description of Artificial Sequence: Synthetic polypeptide
QVQLVQSGAEVKKPGSSVKVSCKASGGTFSSSAISWVRQAPGQGFEWMGGIIPIYGITDYAQKFQGRVTITTDESTSTAYMELSSLTSEDTAVYYCARDDTARRVRGVPYYYYYAMDVWGQGTTVTVSSASTKGPSVFPLAPSSKSTSGGTAALGCLVKDYFPEPVTVSWNSGALTSGVHTFPAVLQSSGLYSLSSVVTVPSSSLGTQTYICNVNHKPSNTKVDKKVEPKSCDKTHTCPPCPAPELLGGPSVFLFPPKPKDTLMISRTPEVTCVVVDVSHEDPEVKFNWYVDGVEVHNAKTKPREEQYNSTYRVVSVLTVLHQDWLNGKEYKCKVSNKALPAPIEKTISKAKGQPREPQVYTLPPSREEMTKNQVSLTCLVKGFYPSDIAVEWESNGQPENNYKTTPPVLDSDGSFFLYSKLTVDKSRWQQGNVFSCSVMHEALHNHYTQKSLSLSPGK

SEQ ID NO: 371 - protein, 108 aa, synthetic construct
  REGION 1..108: note = Description of Artificial Sequence: Synthetic polypeptide
ETTLTQSPAFMSATPGDEVNISCKASQDIDDDVSWYQQKPGGAPIFLIQEASTLVPGIPPRFSGSGFGTDFTLTIKNMESEDAAYYFCLQHDNLPLTFGGGTKVDIKR

SEQ ID NO: 372 - protein, 6 aa, synthetic construct
  REGION 1..6: note = Description of Artificial Sequence: Synthetic peptide
QDIDDD

SEQ ID NO: 373 - skipped

SEQ ID NO: 374 - protein, 9 aa, synthetic construct
  REGION 1..9: note = Description of Artificial Sequence: Synthetic peptide
LQHDNLPLT

SEQ ID NO: 375 - protein, 214 aa, synthetic construct
  REGION 1..214: note = Description of Artificial Sequence: Synthetic polypeptide
ETTLTQSPAFMSATPGDEVNISCKASQDIDDDVSWYQQKPGGAPIFLIQEASTLVPGIPPRFSGSGFGTDFTLTIKNMESEDAAYYFCLQHDNLPLTFGGGTKVDIKRTVAAPSVFIFPPSDEQLKSGTASVVCLLNNFYPREAKVQWKVDNALQSGNSQESVTEQDSKDSTYSLSSTLTLSKADYEKHKVYACEVTHQGLSSPVTKSFNRGEC

SEQ ID NO: 376 - protein, 126 aa, synthetic construct
  REGION 1..126: note = Description of Artificial Sequence: Synthetic polypeptide
EVQLVQSGAEVKKPGASVKVSCKVSGYTLTELSMHWVRQAPGKGLEWMGGFDPEDGETIYAQKFQGRVTMTEDTSTDTAYMELSSLRSEDTAVYYCATEDPGPVAGPYYYYGMDVWGQGTTVTVSS

SEQ ID NO: 377 - protein, 8 aa, synthetic construct
  REGION 1..8: note = Description of Artificial Sequence: Synthetic peptide
GYTLTELS

SEQ ID NO: 378 - protein, 8 aa, synthetic construct
  REGION 1..8: note = Description of Artificial Sequence: Synthetic peptide
FDPEDGET

SEQ ID NO: 379 - protein, 19 aa, synthetic construct
  REGION 1..19: note = Description of Artificial Sequence: Synthetic peptide
ATEDPGPVAGPYYYYGMDV

SEQ ID NO: 380 - protein, 456 aa, synthetic construct
  REGION 1..456: note = Description of Artificial Sequence: Synthetic polypeptide
EVQLVQSGAEVKKPGASVKVSCKVSGYTLTELSMHWVRQAPGKGLEWMGGFDPEDGETIYAQKFQGRVTMTEDTSTDTAYMELSSLRSEDTAVYYCATEDPGPVAGPYYYYGMDVWGQGTTVTVSSASTKGPSVFPLAPSSKSTSGGTAALGCLVKDYFPEPVTVSWNSGALTSGVHTFPAVLQSSGLYSLSSVVTVPSSSLGTQTYICNVNHKPSNTKVDKKVEPKSCDKTHTCPPCPAPELLGGPSVFLFPPKPKDTLMISRTPEVTCVVVDVSHEDPEVKFNWYVDGVEVHNAKTKPREEQYNSTYRVVSVLTVLHQDWLNGKEYKCKVSNKALPAPIEKTISKAKGQPREPQVYTLPPSREEMTKNQVSLTCLVKGFYPSDIAVEWESNGQPENNYKTTPPVLDSDGSFFLYSKLTVDKSRWQQGNVFSCSVMHEALHNHYTQKSLSLSPGK

SEQ ID NO: 381 - protein, 113 aa, synthetic construct
  REGION 1..113: note = Description of Artificial Sequence: Synthetic polypeptide
DVVMTQSPLVLPVTPGEPASISCRSSQSLLYINGYHYLDWYVQRPGQSPQLLIFLGSTRASGVPDRFSGSGSGTDFTLEISKVEAEDVGIYFCMQALQTPPTFGGGTKVEIKR

SEQ ID NO: 382 - protein, 11 aa, synthetic construct
  REGION 1..11: note = Description of Artificial Sequence: Synthetic peptide
QSLLYINGYHY

SEQ ID NO: 383 - skipped

SEQ ID NO: 384 - protein, 9 aa, synthetic construct
  REGION 1..9: note = Description of Artificial Sequence: Synthetic peptide
MQALQTPPT

SEQ ID NO: 385 - protein, 219 aa, synthetic construct
  REGION 1..219: note = Description of Artificial Sequence: Synthetic polypeptide
DVVMTQSPLVLPVTPGEPASISCRSSQSLLYINGYHYLDWYVQRPGQSPQLLIFLGSTRASGVPDRFSGSGSGTDFTLEISKVEAEDVGIYFCMQALQTPPTFGGGTKVEIKRTVAAPSVFIFPPSDEQLKSGTASVVCLLNNFYPREAKVQWKVDNALQSGNSQESVTEQDSKDSTYSLSSTLTLSKADYEKHKVYACEVTHQGLSSPVTKSFNRGEC

SEQ ID NO: 386 - protein, 129 aa, synthetic construct; identical to SEQ ID NO: 366
  REGION 1..129: note = Description of Artificial Sequence: Synthetic polypeptide

SEQ ID NO: 387 - protein, 8 aa, synthetic construct
  REGION 1..8: note = Description of Artificial Sequence: Synthetic peptide
GGTFSSSA

SEQ ID NO: 388 - protein, 8 aa, synthetic construct
  REGION 1..8: note = Description of Artificial Sequence: Synthetic peptide
IIPIYGIT

SEQ ID NO: 389 - protein, 22 aa, synthetic construct
  REGION 1..22: note = Description of Artificial Sequence: Synthetic peptide
ARDDTARRVRGVPYYYYYAMDV

SEQ ID NO: 390 - protein, 459 aa, synthetic construct; identical to SEQ ID NO: 370
  REGION 1..459: note = Description of Artificial Sequence: Synthetic polypeptide

SEQ ID NO: 391 - protein, 114 aa, synthetic construct
  REGION 1..114: note = Description of Artificial Sequence: Synthetic polypeptide
DIVMTQTPLSLPVTPGEPASISCRPSQSLLDSDDGNTYLDWYLQKPGQSPQLLIHTLSYRASGVPDRFSGSGSGTDFTLKISRVEAEDVGVYYCMQRLQFPLTFGGGTKVEIKR

SEQ ID NO: 392 - protein, 12 aa, synthetic construct
  REGION 1..12: note = Description of Artificial Sequence: Synthetic peptide
QSLLDSDDGNTY

SEQ ID NO: 393 - skipped

SEQ ID NO: 394 - protein, 9 aa, synthetic construct
  REGION 1..9: note = Description of Artificial Sequence: Synthetic peptide
MQRLQFPLT

SEQ ID NO: 395 - protein, 220 aa, synthetic construct
  REGION 1..220: note = Description of Artificial Sequence: Synthetic polypeptide
DIVMTQTPLSLPVTPGEPASISCRPSQSLLDSDDGNTYLDWYLQKPGQSPQLLIHTLSYRASGVPDRFSGSGSGTDFTLKISRVEAEDVGVYYCMQRLQFPLTFGGGTKVEIKRTVAAPSVFIFPPSDEQLKSGTASVVCLLNNFYPREAKVQWKVDNALQSGNSQESVTEQDSKDSTYSLSSTLTLSKADYEKHKVYACEVTHQGLSSPVTKSFNRGEC

SEQ ID NO: 396 - protein, 126 aa, synthetic construct; identical to SEQ ID NO: 336
  REGION 1..126: note = Description of Artificial Sequence: Synthetic polypeptide

SEQ ID NO: 397 - protein, 8 aa, synthetic construct
  REGION 1..8: note = Description of Artificial Sequence: Synthetic peptide
GYTLTELS

SEQ ID NO: 398 - protein, 8 aa, synthetic construct
  REGION 1..8: note = Description of Artificial Sequence: Synthetic peptide
FDPEDGET

SEQ ID NO: 399 - protein, 19 aa, synthetic construct
  REGION 1..19: note = Description of Artificial Sequence: Synthetic peptide
ATGVPAAIGVYYYYYYMDV

SEQ ID NO: 400 - protein, 456 aa, synthetic construct; identical to SEQ ID NO: 340
  REGION 1..456: note = Description of Artificial Sequence: Synthetic polypeptide

SEQ ID NO: 401 - protein, 113 aa, synthetic construct
  REGION 1..113: note = Description of Artificial Sequence: Synthetic polypeptide
DVVMTQSPLSLPVTPGEPASISCRSSQSLLYRNGYNYLDWYLQKPGQSPQLLIYWGSYRASGVPDRFSGSGSGTDFTLKISRVEAEDVGVYYCMQAVQNPPTFGQGTKVDIKR

SEQ ID NO: 402 - protein, 11 aa, synthetic construct
  REGION 1..11: note = Description of Artificial Sequence: Synthetic peptide
QSLLYRNGYNY

SEQ ID NO: 403 - skipped

SEQ ID NO: 404 - protein, 9 aa, synthetic construct
  REGION 1..9: note = Description of Artificial Sequence: Synthetic peptide
MQAVQNPPT

SEQ ID NO: 405 - protein, 219 aa, synthetic construct
  REGION 1..219: note = Description of Artificial Sequence: Synthetic polypeptide
DVVMTQSPLSLPVTPGEPASISCRSSQSLLYRNGYNYLDWYLQKPGQSPQLLIYWGSYRASGVPDRFSGSGSGTDFTLKISRVEAEDVGVYYCMQAVQNPPTFGQGTKVDIKRTVAAPSVFIFPPSDEQLKSGTASVVCLLNNFYPREAKVQWKVDNALQSGNSQESVTEQDSKDSTYSLSSTLTLSKADYEKHKVYACEVTHQGLSSPVTKSFNRGEC

SEQ ID NO: 406 - protein, 129 aa, synthetic construct; identical to SEQ ID NO: 366
  REGION 1..129: note = Description of Artificial Sequence: Synthetic polypeptide

SEQ ID NO: 407 - protein, 8 aa, synthetic construct
  REGION 1..8: note = Description of Artificial Sequence: Synthetic peptide
GGTFSSSA

SEQ ID NO: 408 - protein, 8 aa, synthetic construct
  REGION 1..8: note = Description of Artificial Sequence: Synthetic peptide
IIPIYGIT

SEQ ID NO: 409 - protein, 22 aa, synthetic construct
  REGION 1..22: note = Description of Artificial Sequence: Synthetic peptide
ARDDTARRVRGVPYYYYYAMDV

SEQ ID NO: 410 - protein, 459 aa, synthetic construct; identical to SEQ ID NO: 370
  REGION 1..459: note = Description of Artificial Sequence: Synthetic polypeptide

SEQ ID NO: 411 - protein, 109 aa, synthetic construct
  REGION 1..109: note = Description of Artificial Sequence: Synthetic polypeptide
DVVMTQSPAFLSVTPGERVTLSCKASQTMNNYLAWYQQKPGQAPRLLIYDASTRATDTPPRFSGSGSGTEFTLTISSVQSEDFALYYCQQYGDWLPITFGQGTRLEIKR

SEQ ID NO: 412 - protein, 6 aa, synthetic construct
  REGION 1..6: note = Description of Artificial Sequence: Synthetic peptide
QTMNNY

SEQ ID NO: 413 - skipped

SEQ ID NO: 414 - protein, 10 aa, synthetic construct
  REGION 1..10: note = Description of Artificial Sequence: Synthetic peptide
QQYGDWLPIT

SEQ ID NO: 415 - protein, 215 aa, synthetic construct
  REGION 1..215: note = Description of Artificial Sequence: Synthetic polypeptide
DVVMTQSPAFLSVTPGERVTLSCKASQTMNNYLAWYQQKPGQAPRLLIYDASTRATDTPPRFSGSGSGTEFTLTISSVQSEDFALYYCQQYGDWLPITFGQGTRLEIKRTVAAPSVFIFPPSDEQLKSGTASVVCLLNNFYPREAKVQWKVDNALQSGNSQESVTEQDSKDSTYSLSSTLTLSKADYEKHKVYACEVTHQGLSSPVTKSFNRGEC

SEQ ID NO: 416 - protein, 124 aa, synthetic construct
  REGION 1..124: note = Description of Artificial Sequence: Synthetic polypeptide
EVQLVQSGAEVKKPGASVKVSCKVSGYTLTELSMHWVRQAPGKGLEWMGGFDPEDGETIYAQKFQGRVTMTEDTSTDTAYMELSSLRSEDTAVYYCATAFPEATISYYYYMDVWGKGTTVTVSS

SEQ ID NO: 417 - protein, 8 aa, synthetic construct
  REGION 1..8: note = Description of Artificial Sequence: Synthetic peptide
GYTLTELS

SEQ ID NO: 418 - protein, 8 aa, synthetic construct
  REGION 1..8: note = Description of Artificial Sequence: Synthetic peptide
FDPEDGET

SEQ ID NO: 419 - protein, 17 aa, synthetic construct
  REGION 1..17: note = Description of Artificial Sequence: Synthetic peptide
ATAFPEATISYYYYMDV

SEQ ID NO: 420 - protein, 454 aa, synthetic construct
  REGION 1..454: note = Description of Artificial Sequence: Synthetic polypeptide
EVQLVQSGAEVKKPGASVKVSCKVSGYTLTELSMHWVRQAPGKGLEWMGGFDPEDGETIYAQKFQGRVTMTEDTSTDTAYMELSSLRSEDTAVYYCATAFPEATISYYYYMDVWGKGTTVTVSSASTKGPSVFPLAPSSKSTSGGTAALGCLVKDYFPEPVTVSWNSGALTSGVHTFPAVLQSSGLYSLSSVVTVPSSSLGTQTYICNVNHKPSNTKVDKKVEPKSCDKTHTCPPCPAPELLGGPSVFLFPPKPKDTLMISRTPEVTCVVVDVSHEDPEVKFNWYVDGVEVHNAKTKPREEQYNSTYRVVSVLTVLHQDWLNGKEYKCKVSNKALPAPIEKTISKAKGQPREPQVYTLPPSREEMTKNQVSLTCLVKGFYPSDIAVEWESNGQPENNYKTTPPVLDSDGSFFLYSKLTVDKSRWQQGNVFSCSVMHEALHNHYTQKSLSLSPGK

SEQ ID NO: 421 - protein, 113 aa, synthetic construct
  REGION 1..113: note = Description of Artificial Sequence: Synthetic polypeptide
DVVMTQSPLSLPVTPGEPASISCRSSQSLLYRNGYNYLDWYLQKPGQSPQLLIYWGSYRASGVPDRFSGSGSGTDFTLKISRVEAEDVGVYYCMQAVQNPPTFGQGTKVEIKR

SEQ ID NO: 422 - protein, 11 aa, synthetic construct
  REGION 1..11: note = Description of Artificial Sequence: Synthetic peptide
QSLLYRNGYNY

SEQ ID NO: 423 - skipped

SEQ ID NO: 424 - protein, 9 aa, synthetic construct
  REGION 1..9: note = Description of Artificial Sequence: Synthetic peptide
MQAVQNPPT

SEQ ID NO: 425 - protein, 219 aa, synthetic construct
  REGION 1..219: note = Description of Artificial Sequence: Synthetic polypeptide
DVVMTQSPLSLPVTPGEPASISCRSSQSLLYRNGYNYLDWYLQKPGQSPQLLIYWGSYRASGVPDRFSGSGSGTDFTLKISRVEAEDVGVYYCMQAVQNPPTFGQGTKVEIKRTVAAPSVFIFPPSDEQLKSGTASVVCLLNNFYPREAKVQWKVDNALQSGNSQESVTEQDSKDSTYSLSSTLTLSKADYEKHKVYACEVTHQGLSSPVTKSFNRGEC

SEQ ID NO: 426 - protein, 129 aa, synthetic construct
  REGION 1..129: note = Description of Artificial Sequence: Synthetic polypeptide
QMQLVQSGAEVKKPGSSVKVSCKASGGTFSSSAISWVRQAPGQGFEWMGGIIPIYGITDYAQKFQGRVTITTDESTSTAYMELSSLTSEDTAVYYCARDDTARRVRGVPYYYYYAMDVWGQGTTVTVSS

SEQ ID NO: 427 - protein, 8 aa, synthetic construct
  REGION 1..8: note = Description of Artificial Sequence: Synthetic peptide
GGTFSSSA

SEQ ID NO: 428 - protein, 8 aa, synthetic construct
  REGION 1..8: note = Description of Artificial Sequence: Synthetic peptide
IIPIYGIT

SEQ ID NO: 429 - protein, 22 aa, synthetic construct
  REGION 1..22: note = Description of Artificial Sequence: Synthetic peptide
ARDDTARRVRGVPYYYYYAMDV

SEQ ID NO: 430 - protein, 459 aa, synthetic construct
  REGION 1..459: note = Description of Artificial Sequence: Synthetic polypeptide
QMQLVQSGAEVKKPGSSVKVSCKASGGTFSSSAISWVRQAPGQGFEWMGGIIPIYGITDYAQKFQGRVTITTDESTSTAYMELSSLTSEDTAVYYCARDDTARRVRGVPYYYYYAMDVWGQGTTVTVSSASTKGPSVFPLAPSSKSTSGGTAALGCLVKDYFPEPVTVSWNSGALTSGVHTFPAVLQSSGLYSLSSVVTVPSSSLGTQTYICNVNHKPSNTKVDKKVEPKSCDKTHTCPPCPAPELLGGPSVFLFPPKPKDTLMISRTPEVTCVVVDVSHEDPEVKFNWYVDGVEVHNAKTKPREEQYNSTYRVVSVLTVLHQDWLNGKEYKCKVSNKALPAPIEKTISKAKGQPREPQVYTLPPSREEMTKNQVSLTCLVKGFYPSDIAVEWESNGQPENNYKTTPPVLDSDGSFFLYSKLTVDKSRWQQGNVFSCSVMHEALHNHYTQKSLSLSPGK

SEQ ID NO: 431 - protein, 114 aa, synthetic construct
  REGION 1..114: note = Description of Artificial Sequence: Synthetic polypeptide
DIVMTQTPLSLPVTPGEPASMSCRSSRSLLDSDDGNTHLDWYLQKPGQSPQLLIQSLSYRASGVPDRFSGSGSGTDFTLEISRVEAEDVGIYYCMQRKEFPLTFGGGTKVEIKR

SEQ ID NO: 432 - protein, 12 aa, synthetic construct
  REGION 1..12: note = Description of Artificial Sequence: Synthetic peptide
RSLLDSDDGNTH

SEQ ID NO: 433 - skipped

SEQ ID NO: 434 - protein, 9 aa, synthetic construct
  REGION 1..9: note = Description of Artificial Sequence: Synthetic peptide
MQRKEFPLT

SEQ ID NO: 435 - protein, 220 aa, synthetic construct
  REGION 1..220: note = Description of Artificial Sequence: Synthetic polypeptide
DIVMTQTPLSLPVTPGEPASMSCRSSRSLLDSDDGNTHLDWYLQKPGQSPQLLIQSLSYRASGVPDRFSGSGSGTDFTLEISRVEAEDVGIYYCMQRKEFPLTFGGGTKVEIKRTVAAPSVFIFPPSDEQLKSGTASVVCLLNNFYPREAKVQWKVDNALQSGNSQESVTEQDSKDSTYSLSSTLTLSKADYEKHKVYACEVTHQGLSSPVTKSFNRGEC

SEQ ID NO: 436 - protein, 128 aa, synthetic construct
  REGION 1..128: note = Description of Artificial Sequence: Synthetic polypeptide
EVQLVQSGAEVKKPGSSVKVSCKASGGTFSSYAISWVRQAPGQGLEWMGGIIPIFGTANYAQKFQGRVTITADKSTSTAYMELSSLRSEDTAVYYCARGPWYYDSSGYSSYAYYMDVWGQGTTVTVSS

SEQ ID NO: 437 - protein, 8 aa, synthetic construct
  REGION 1..8: note = Description of Artificial Sequence: Synthetic peptide
GGTFSSYA

SEQ ID NO: 438 - protein, 8 aa, synthetic construct
  REGION 1..8: note = Description of Artificial Sequence: Synthetic peptide
IIPIFGTA

SEQ ID NO: 439 - protein, 21 aa, synthetic construct
  REGION 1..21: note = Description of Artificial Sequence: Synthetic peptide
ARGPWYYDSSGYSSYAYYMDV

SEQ ID NO: 440 - protein, 458 aa, synthetic construct; identical to SEQ ID NO: 190
  REGION 1..458: note = Description of Artificial Sequence: Synthetic polypeptide

SEQ ID NO: 441 - protein, 114 aa, synthetic construct
  REGION 1..114: note = Description of Artificial Sequence: Synthetic polypeptide
DVVMTQSPLSLPVTPGEPASISCRSSQSLLHSDGYNYLDWYLQKPGQSPQLLIYLGSNRASGVPDRFSGSGSGTDFTLKISRVEAEDVGVYYCMQALHTPGVTFGGGTKVEIKR

SEQ ID NO: 442 - protein, 11 aa, synthetic construct
  REGION 1..11: note = Description of Artificial Sequence: Synthetic peptide
QSLLHSDGYNY

SEQ ID NO: 443 - skipped

SEQ ID NO: 444 - protein, 10 aa, synthetic construct
  REGION 1..10: note = Description of Artificial Sequence: Synthetic peptide
MQALHTPGVT

SEQ ID NO: 445 - protein, 220 aa, synthetic construct
  REGION 1..220: note = Description of Artificial Sequence: Synthetic polypeptide
DVVMTQSPLSLPVTPGEPASISCRSSQSLLHSDGYNYLDWYLQKPGQSPQLLIYLGSNRASGVPDRFSGSGSGTDFTLKISRVEAEDVGVYYCMQALHTPGVTFGGGTKVEIKRTVAAPSVFIFPPSDEQLKSGTASVVCLLNNFYPREAKVQWKVDNALQSGNSQESVTEQDSKDSTYSLSSTLTLSKADYEKHKVYACEVTHQGLSSPVTKSFNRGEC

SEQ ID NO: 446 - protein, 123 aa, synthetic construct
  REGION 1..123: note = Description of Artificial Sequence: Synthetic polypeptide
QLQLQESGPGLVKPSETLSLTCTVTGGSISSSSYYWAWIRQPPGKGLEWIGGIYYSGSTYYNVSLESRVTISQDTSKNQFSLKLTSVTAADTAVYYCARGAWELRLGDWFDPWGQGTLVTVSS

SEQ ID NO: 447 - protein, 10 aa, synthetic construct
  REGION 1..10: note = Description of Artificial Sequence: Synthetic peptide
GGSISSSSYY

SEQ ID NO: 448 - protein, 7 aa, synthetic construct
  REGION 1..7: note = Description of Artificial Sequence: Synthetic peptide
IYYSGST

SEQ ID NO: 449 - protein, 15 aa, synthetic construct
  REGION 1..15: note = Description of Artificial Sequence: Synthetic peptide
ARGAWELRLGDWFDP

SEQ ID NO: 450 - protein, 453 aa, synthetic construct
  REGION 1..453: note = Description of Artificial Sequence: Synthetic polypeptide
QLQLQESGPGLVKPSETLSLTCTVTGGSISSSSYYWAWIRQPPGKGLEWIGGIYYSGSTYYNVSLESRVTISQDTSKNQFSLKLTSVTAADTAVYYCARGAWELRLGDWFDPWGQGTLVTVSSASTKGPSVFPLAPSSKSTSGGTAALGCLVKDYFPEPVTVSWNSGALTSGVHTFPAVLQSSGLYSLSSVVTVPSSSLGTQTYICNVNHKPSNTKVDKKVEPKSCDKTHTCPPCPAPELLGGPSVFLFPPKPKDTLMISRTPEVTCVVVDVSHEDPEVKFNWYVDGVEVHNAKTKPREEQYNSTYRVVSVLTVLHQDWLNGKEYKCKVSNKALPAPIEKTISKAKGQPREPQVYTLPPSREEMTKNQVSLTCLVKGFYPSDIAVEWESNGQPENNYKTTPPVLDSDGSFFLYSKLTVDKSRWQQGNVFSCSVMHEALHNHYTQKSLSLSPGK

SEQ ID NO: 451 - protein, 118 aa, synthetic construct
  REGION 1..118: note = Description of Artificial Sequence: Synthetic polypeptide
QSVLTQPPSVSGAPGQRVTISCTGSSSNIGAGYDIQWYQQLPGTAPKLLIYGYSNRPSGVPDRFSGSKSGTSASLAITGLQAEDEADYYCQSYDSSLSVYVVFGGGTQLTVLGQPKAA

SEQ ID NO: 452 - protein, 9 aa, synthetic construct
  REGION 1..9: note = Description of Artificial Sequence: Synthetic peptide
SSNIGAGYD

SEQ ID NO: 453 - skipped

SEQ ID NO: 454 - protein, 12 aa, synthetic construct
  REGION 1..12: note = Description of Artificial Sequence: Synthetic peptide
QSYDSSLSVYVV

SEQ ID NO: 455 - protein, 218 aa, synthetic construct
  REGION 1..218: note = Description of Artificial Sequence: Synthetic polypeptide
QSVLTQPPSVSGAPGQRVTISCTGSSSNIGAGYDIQWYQQLPGTAPKLLIYGYSNRPSGVPDRFSGSKSGTSASLAITGLQAEDEADYYCQSYDSSLSVYVVFGGGTQLTVLGQPKAAPSVTLFPPSSEELQANKATLVCLISDFYPGAVTVAWKADSSPVKAGVETTTPSKQSNNKYAASSYLSLTPEQWKSHRSYSCQVTHEGSTVEKTVAPTECS

SEQ ID NO: 456 - protein, 122 aa, synthetic construct
  REGION 1..122: note = Description of Artificial Sequence: Synthetic polypeptide
QVQLQESGGGVVQPGGSLRLSCAASRFTFEDYAMHWVRQPPGKGLEWVSGISWKSGGINYADSVKGRFTISRDNAQNSLYLQMNSLRAEDTALYYCVKDPTLVATDRAFNIWGQGTMVTVSS

SEQ ID NO: 457 - protein, 8 aa, synthetic construct
  REGION 1..8: note = Description of Artificial Sequence: Synthetic peptide
RFTFEDYA

SEQ ID NO: 458 - protein, 8 aa, synthetic construct
  REGION 1..8: note = Description of Artificial Sequence: Synthetic peptide
ISWKSGGI

SEQ ID NO: 459 - protein, 15 aa, synthetic construct
  REGION 1..15: note = Description of Artificial Sequence: Synthetic peptide
VKDPTLVATDRAFNI

SEQ ID NO: 460 - protein, 452 aa, synthetic construct
  REGION 1..452: note = Description of Artificial Sequence: Synthetic polypeptide
QVQLQESGGGVVQPGGSLRLSCAASRFTFEDYAMHWVRQPPGKGLEWVSGISWKSGGINYADSVKGRFTISRDNAQNSLYLQMNSLRAEDTALYYCVKDPTLVATDRAFNIWGQGTMVTVSSASTKGPSVFPLAPSSKSTSGGTAALGCLVKDYFPEPVTVSWNSGALTSGVHTFPAVLQSSGLYSLSSVVTVPSSSLGTQTYICNVNHKPSNTKVDKKVEPKSCDKTHTCPPCPAPELLGGPSVFLFPPKPKDTLMISRTPEVTCVVVDVSHEDPEVKFNWYVDGVEVHNAKTKPREEQYNSTYRVVSVLTVLHQDWLNGKEYKCKVSNKALPAPIEKTISKAKGQPREPQVYTLPPSREEMTKNQVSLTCLVKGFYPSDIAVEWESNGQPENNYKTTPPVLDSDGSFFLYSKLTVDKSRWQQGNVFSCSVMHEALHNHYTQKSLSLSPGK

SEQ ID NO: 461 - protein, 117 aa, synthetic construct
  REGION 1..117: note = Description of Artificial Sequence: Synthetic polypeptide
DVVMTQSPLSLPVTPGEPASISCRSSQSLLHSNGYNYLDWYLQKPGQSPQLLIYLGSNRASGVPDRFSGSGSGTDFTLKISRVEAEDVGVYYCMQYLQTPDTFGQGTKLEIKRAAPS

SEQ ID NO: 462 - protein, 11 aa, synthetic construct
  REGION 1..11: note = Description of Artificial Sequence: Synthetic peptide
QSLLHSNGYNY

SEQ ID NO: 463 - skipped

SEQ ID NO: 464 - protein, 9 aa, synthetic construct
  REGION 1..9: note = Description of Artificial Sequence: Synthetic peptide
MQYLQTPDT

SEQ ID NO: 465 - protein, 219 aa, synthetic construct
  REGION 1..219: note = Description of Artificial Sequence: Synthetic polypeptide
DVVMTQSPLSLPVTPGEPASISCRSSQSLLHSNGYNYLDWYLQKPGQSPQLLIYLGSNRASGVPDRFSGSGSGTDFTLKISRVEAEDVGVYYCMQYLQTPDTFGQGTKLEIKRTVAAPSVFIFPPSDEQLKSGTASVVCLLNNFYPREAKVQWKVDNALQSGNSQESVTEQDSKDSTYSLSSTLTLSKADYEKHKVYACEVTHQGLSSPVTKSFNRGEC

SEQ ID NO: 466 - protein, 129 aa, synthetic construct; identical to SEQ ID NO: 366
  REGION 1..129: note = Description of Artificial Sequence: Synthetic polypeptide

SEQ ID NO: 467 - protein, 8 aa, synthetic construct
  REGION 1..8: note = Description of Artificial Sequence: Synthetic peptide
GGTFSSSA

SEQ ID NO: 468 - protein, 8 aa, synthetic construct
  REGION 1..8: note = Description of Artificial Sequence: Synthetic peptide
IIPIYGIT

SEQ ID NO: 469 - protein, 22 aa, synthetic construct
  REGION 1..22: note = Description of Artificial Sequence: Synthetic peptide
ARDDTARRVRGVPYYYYYAMDV

SEQ ID NO: 470 - protein, 459 aa, synthetic construct; identical to SEQ ID NO: 370
  REGION 1..459: note = Description of Artificial Sequence: Synthetic polypeptide

SEQ ID NO: 471 - protein, 114 aa, synthetic construct
  REGION 1..114: note = Description of Artificial Sequence: Synthetic polypeptide
EIVLTQSPDFQSVTPKEKVTITCRASQNIDSSLHWYQQKPGQSPKLLINYASQSFSGVPSRFSGSGSGTDFTLTIDSLEPEDAATYFCHQSSSLPLTFGGGTKVEIRRTVAAPS

SEQ ID NO: 472 - protein, 6 aa, synthetic construct
  REGION 1..6: note = Description of Artificial Sequence: Synthetic peptide
QNIDSS

SEQ ID NO: 473 - skipped

SEQ ID NO: 474 - protein, 9 aa, synthetic construct
  REGION 1..9: note = Description of Artificial Sequence: Synthetic peptide
HQSSSLPLT

SEQ ID NO: 475 - protein, 218 aa, synthetic construct; identical to SEQ ID NO: 455
  REGION 1..218: note = Description of Artificial Sequence: Synthetic polypeptide

SEQ ID NO: 476 - protein, 129 aa, synthetic construct
  REGION 1..129: note = Description of Artificial Sequence: Synthetic polypeptide
EVQLVQSGAEVKKPGSSVKVSCKTSGGTFSSSAISWVRQAPGQGFEWMGGIIPIYGITDYAQKFQGRVTITTDESTSTAYMELSSLTSEDTAVYYCARDDTARRVRGVPYYYYYAMDVWGQGTTVTVSS

SEQ ID NO: 477 - protein, 8 aa, synthetic construct
  REGION 1..8: note = Description of Artificial Sequence: Synthetic peptide
GGTFSSSA

SEQ ID NO: 478 - protein, 8 aa, synthetic construct
  REGION 1..8: note = Description of Artificial Sequence: Synthetic peptide
IIPIYGIT

SEQ ID NO: 479 - protein, 22 aa, synthetic construct
  REGION 1..22: note = Description of Artificial Sequence: Synthetic peptide
ARDDTARRVRGVPYYYYYAMDV

SEQ ID NO: 480 - protein, 459 aa, synthetic construct
  REGION 1..459: note = Description of Artificial Sequence: Synthetic polypeptide
EVQLVQSGAEVKKPGSSVKVSCKTSGGTFSSSAISWVRQAPGQGFEWMGGIIPIYGITDYAQKFQGRVTITTDESTSTAYMELSSLTSEDTAVYYCARDDTARRVRGVPYYYYYAMDVWGQGTTVTVSSASTKGPSVFPLAPSSKSTSGGTAALGCLVKDYFPEPVTVSWNSGALTSGVHTFPAVLQSSGLYSLSSVVTVPSSSLGTQTYICNVNHKPSNTKVDKKVEPKSCDKTHTCPPCPAPELLGGPSVFLFPPKPKDTLMISRTPEVTCVVVDVSHEDPEVKFNWYVDGVEVHNAKTKPREEQYNSTYRVVSVLTVLHQDWLNGKEYKCKVSNKALPAPIEKTISKAKGQPREPQVYTLPPSREEMTKNQVSLTCLVKGFYPSDIAVEWESNGQPENNYKTTPPVLDSDGSFFLYSKLTVDKSRWQQGNVFSCSVMHEALHNHYTQKSLSLSPGK

SEQ ID NO: 481 - protein, 114 aa, synthetic construct
  REGION 1..114: note = Description of Artificial Sequence: Synthetic polypeptide
EIVLTQSPGTLSLSPGERATLSCRASQSVSSYLAWYQQKPGQAPRLLIYDASNRATGIPARFSGSGSGTDFTLTISSLQSEDFAVYYCQQYDDWPQTFGQGTRLEIKRTVAAPS

SEQ ID NO: 482 - protein, 6 aa, synthetic construct
  REGION 1..6: note = Description of Artificial Sequence: Synthetic peptide
QSVSSY

SEQ ID NO: 483 - skipped

SEQ ID NO: 484 - protein, 9 aa, synthetic construct
  REGION 1..9: note = Description of Artificial Sequence: Synthetic peptide
QQYDDWPQT

SEQ ID NO: 485 - protein, 214 aa, synthetic construct
  REGION 1..214: note = Description of Artificial Sequence: Synthetic polypeptide
EIVLTQSPGTLSLSPGERATLSCRASQSVSSYLAWYQQKPGQAPRLLIYDASNRATGIPARFSGSGSGTDFTLTISSLQSEDFAVYYCQQYDDWPQTFGQGTRLEIKRTVAAPSVFIFPPSDEQLKSGTASVVCLLNNFYPREAKVQWKVDNALQSGNSQESVTEQDSKDSTYSLSSTLTLSKADYEKHKVYACEVTHQGLSSPVTKSFNRGEC

SEQ ID NO: 486 - protein, 129 aa, synthetic construct; identical to SEQ ID NO: 426
  REGION 1..129: note = Description of Artificial Sequence: Synthetic polypeptide

SEQ ID NO: 487 - protein, 8 aa, synthetic construct
  REGION 1..8: note = Description of Artificial Sequence: Synthetic peptide
GGTFSSSA

SEQ ID NO: 488 - protein, 8 aa, synthetic construct
  REGION 1..8: note = Description of Artificial Sequence: Synthetic peptide
IIPIYGIT

SEQ ID NO: 489 - protein, 22 aa, synthetic construct
  REGION 1..22: note = Description of Artificial Sequence: Synthetic peptide
ARDDTARRVRGVPYYYYYAMDV

SEQ ID NO: 490 - protein, 459 aa, synthetic construct; identical to SEQ ID NO: 430
  REGION 1..459: note = Description of Artificial Sequence: Synthetic polypeptide

SEQ ID NO: 491 - protein, 114 aa, synthetic construct
  REGION 1..114: note = Description of Artificial Sequence: Synthetic polypeptide
EIVMTQSPATLSLSTGERATLFCRTSQNVYGEVAWYQQKPGQAPRLLIYDTFERAAGIPAKFSGSGSGTDFTLTISRVEPEDFAVYYCQQRRDWPITFGQGTRLEIKRTVAAPS

SEQ ID NO: 492 - protein, 6 aa, synthetic construct
  REGION 1..6: note = Description of Artificial Sequence: Synthetic peptide
QNVYGE

SEQ ID NO: 493 - skipped

SEQ ID NO: 494 - protein, 9 aa, synthetic construct
  REGION 1..9: note = Description of Artificial Sequence: Synthetic peptide
QQRRDWPIT

SEQ ID NO: 495 - protein, 214 aa, synthetic construct
  REGION 1..214: note = Description of Artificial Sequence: Synthetic polypeptide
EIVMTQSPATLSLSTGERATLFCRTSQNVYGEVAWYQQKPGQAPRLLIYDTFERAAGIPAKFSGSGSGTDFTLTISRVEPEDFAVYYCQQRRDWPITFGQGTRLEIKRTVAAPSVFIFPPSDEQLKSGTASVVCLLNNFYPREAKVQWKVDNALQSGNSQESVTEQDSKDSTYSLSSTLTLSKADYEKHKVYACEVTHQGLSSPVTKSFNRGEC

SEQ ID NO: 496 - protein, 129 aa, synthetic construct; identical to SEQ ID NO: 366
  REGION 1..129: note = Description of Artificial Sequence: Synthetic polypeptide

SEQ ID NO: 497 - protein, 8 aa, synthetic construct
  REGION 1..8: note = Description of Artificial Sequence: Synthetic peptide
GGTFSSSA

SEQ ID NO: 498 - protein, 8 aa, synthetic construct
  REGION 1..8: note = Description of Artificial Sequence: Synthetic peptide
IIPIYGIT

SEQ ID NO: 499 - protein, 22 aa, synthetic construct
  REGION 1..22: note = Description of Artificial Sequence: Synthetic peptide
ARDDTARRVRGVPYYYYYAMDV

SEQ ID NO: 500 - protein, 459 aa, synthetic construct; identical to SEQ ID NO: 370
  REGION 1..459: note = Description of Artificial Sequence: Synthetic polypeptide

SEQ ID NO: 501 - protein, 114 aa, synthetic construct
  REGION 1..114: note = Description of Artificial Sequence: Synthetic polypeptide
DIQMTQSPSSLSASVGDRVTITCQASRDISDSLSWYQQKPGKAPKLLIFDASNLKTGVSSRFSGSGSGTDFTFTISSLQPEDIATYYCHQYDNLPLTFGGGTKVEIKRTVAAPS

SEQ ID NO: 502 - protein, 6 aa, synthetic construct
  REGION 1..6: note = Description of Artificial Sequence: Synthetic peptide
RDISDS

SEQ ID NO: 503 - skipped

SEQ ID NO: 504 - protein, 9 aa, synthetic construct
  REGION 1..9: note = Description of Artificial Sequence: Synthetic peptide
HQYDNLPLT

SEQ ID NO: 505 - protein, 214 aa, synthetic construct
  REGION 1..214: note = Description of Artificial Sequence: Synthetic polypeptide
DIQMTQSPSSLSASVGDRVTITCQASRDISDSLSWYQQKPGKAPKLLIFDASNLKTGVSSRFSGSGSGTDFTFTISSLQPEDIATYYCHQYDNLPLTFGGGTKVEIKRTVAAPSVFIFPPSDEQLKSGTASVVCLLNNFYPREAKVQWKVDNALQSGNSQESVTEQDSKDSTYSLSSTLTLSKADYEKHKVYACEVTHQGLSSPVTKSFNRGEC

SEQ ID NO: 506 - protein, 129 aa, synthetic construct; identical to SEQ ID NO: 426
  REGION 1..129: note = Description of Artificial Sequence: Synthetic polypeptide

SEQ ID NO: 507 - protein, 8 aa, synthetic construct
  REGION 1..8: note = Description of Artificial Sequence: Synthetic peptide
GGTFSSSA

SEQ ID NO: 508 - protein, 8 aa, synthetic construct
  REGION 1..8: note = Description of Artificial Sequence: Synthetic peptide
IIPIYGIT

SEQ ID NO: 509 - protein, 22 aa, synthetic construct
  REGION 1..22: note = Description of Artificial Sequence: Synthetic peptide
ARDDTARRVRGVPYYYYYAMDV

SEQ ID NO: 510 - protein, 459 aa, synthetic construct; identical to SEQ ID NO: 430
  REGION 1..459: note = Description of Artificial Sequence: Synthetic polypeptide

SEQ ID NO: 511 - protein, 114 aa, synthetic construct
  REGION 1..114: note = Description of Artificial Sequence: Synthetic polypeptide
EIVMTQSPATLSLSPGERATLSCRASESVTTFLAWYQQKPGQAPRLLITDASNRATGIPGRFSGSGSGTDFTLTISSLEPEDFAVYYCHQHTNWPLTFGGGTKLEIKRTVAAPS

SEQ ID NO: 512 - protein, 6 aa, synthetic construct
  REGION 1..6: note = Description of Artificial Sequence: Synthetic peptide
ESVTTF

SEQ ID NO: 513 - skipped

SEQ ID NO: 514 - protein, 9 aa, synthetic construct
  REGION 1..9: note = Description of Artificial Sequence: Synthetic peptide
HQHTNWPLT

SEQ ID NO: 515 - protein, 214 aa, synthetic construct
  REGION 1..214: note = Description of Artificial Sequence: Synthetic polypeptide
EIVMTQSPATLSLSPGERATLSCRASESVTTFLAWYQQKPGQAPRLLITDASNRATGIPGRFSGSGSGTDFTLTISSLEPEDFAVYYCHQHTNWPLTFGGGTKLEIKRTVAAPSVFIFPPSDEQLKSGTASVVCLLNNFYPREAKVQWKVDNALQSGNSQESVTEQDSKDSTYSLSSTLTLSKADYEKHKVYACEVTHQGLSSPVTKSFNRGEC

SEQ ID NO: 516 - protein, 129 aa, synthetic construct
  REGION 1..129: note = Description of Artificial Sequence: Synthetic polypeptide
EVQLVQSGAEVKKPGASVKVSCKVSGYTLTELSMHWVRQAPGKGLEWMGGFDPEDGETIYAQKFQGRVTMTEDTSTDTAYMELSSLRSEDTAVYYCATEVGYCSGGSCYISYYYGMDVWGQGTTVTVSS

SEQ ID NO: 517 - protein, 8 aa, synthetic construct
  REGION 1..8: note = Description of Artificial Sequence: Synthetic peptide
GYTLTELS

SEQ ID NO: 518 - protein, 8 aa, synthetic construct
  REGION 1..8: note = Description of Artificial Sequence: Synthetic peptide
FDPEDGET

SEQ ID NO: 519 - protein, 22 aa, synthetic construct
  REGION 1..22: note = Description of Artificial Sequence: Synthetic peptide
ATEVGYCSGGSCYISYYYGMDV

SEQ ID NO: 520 - protein, 459 aa, synthetic construct
  REGION 1..459: note = Description of Artificial Sequence: Synthetic polypeptide
EVQLVQSGAEVKKPGASVKVSCKVSGYTLTELSMHWVRQAPGKGLEWMGGFDPEDGETIYAQKFQGRVTMTEDTSTDTAYMELSSLRSEDTAVYYCATEVGYCSGGSCYISYYYGMDVWGQGTTVTVSSASTKGPSVFPLAPSSKSTSGGTAALGCLVKDYFPEPVTVSWNSGALTSGVHTFPAVLQSSGLYSLSSVVTVPSSSLGTQTYICNVNHKPSNTKVDKKVEPKSCDKTHTCPPCPAPELLGGPSVFLFPPKPKDTLMISRTPEVTCVVVDVSHEDPEVKFNWYVDGVEVHNAKTKPREEQYNSTYRVVSVLTVLHQDWLNGKEYKCKVSNKALPAPIEKTISKAKGQPREPQVYTLPPSREEMTKNQVSLTCLVKGFYPSDIAVEWESNGQPENNYKTTPPVLDSDGSFFLYSKLTVDKSRWQQGNVFSCSVMHEALHNHYTQKSLSLSPGK

SEQ ID NO: 521 - protein, 119 aa, synthetic construct
  REGION 1..119: note = Description of Artificial Sequence: Synthetic polypeptide
DVVMTQSPLSLPVTPGEPASISCRSSQSLLYRNGHNFLDWYVQKPGQSPQLLIYLGSNRASGVPDRFSGSGSGTDFTLKISRVEAEDVGVYYCMQALQTPPTFGQGTKLEIKRTVAAPS

SEQ ID NO: 522 - protein, 11 aa, synthetic construct
  REGION 1..11: note = Description of Artificial Sequence: Synthetic peptide
QSLLYRNGHNF

SEQ ID NO: 523 - skipped

SEQ ID NO: 524 - protein, 9 aa, synthetic construct
  REGION 1..9: note = Description of Artificial Sequence: Synthetic peptide
MQALQTPPT

SEQ ID NO: 525 - protein, 219 aa, synthetic construct
  REGION 1..219: note = Description of Artificial Sequence: Synthetic polypeptide
DVVMTQSPLSLPVTPGEPASISCRSSQSLLYRNGHNFLDWYVQKPGQSPQLLIYLGSNRASGVPDRFSGSGSGTDFTLKISRVEAEDVGVYYCMQALQTPPTFGQGTKLEIKRTVAAPSVFIFPPSDEQLKSGTASVVCLLNNFYPREAKVQWKVDNALQSGNSQESVTEQDSKDSTYSLSSTLTLSKADYEKHKVYACEVTHQGLSSPVTKSFNRGEC

SEQ ID NO: 526 - protein, 8 aa, synthetic construct
  REGION 1..8: note = Description of Artificial Sequence: Synthetic peptide
GGTFSSYA

SEQ ID NO: 527 - protein, 8 aa, synthetic construct
  REGION 1..8: note = Description of Artificial Sequence: Synthetic peptide
IIPIFGTA

SEQ ID NO: 528 - protein, 13 aa, synthetic construct
  REGION 1..13: note = Description of Artificial Sequence: Synthetic peptide
AREEVSSPYGMDV

SEQ ID NO: 529 - protein, 9 aa, synthetic construct
  REGION 1..9: note = Description of Artificial Sequence: Synthetic peptide
TGAVTSGHY

SEQ ID NO: 530 - skipped

SEQ ID NO: 531 - protein, 10 aa, synthetic construct
  REGION 1..10: note = Description of Artificial Sequence: Synthetic peptide
LLSYSGASWV

SEQ ID NO: 532 - protein, 8 aa, synthetic construct
  REGION 1..8: note = Description of Artificial Sequence: Synthetic peptide
GGTFSSSA

SEQ ID NO: 533 - protein, 8 aa, synthetic construct
  REGION 1..8: note = Description of Artificial Sequence: Synthetic peptide
IIPIYGIT

SEQ ID NO: 534 - protein, 22 aa, synthetic construct
  REGION 1..22: note = Description of Artificial Sequence: Synthetic peptide
ARDDTARRVRGVPYYYYYAMDV

SEQ ID NO: 535 - protein, 6 aa, synthetic construct
  REGION 1..6: note = Description of Artificial Sequence: Synthetic peptide
QGIGNY

SEQ ID NO: 536 - skipped

SEQ ID NO: 537 - protein, 9 aa, synthetic construct
  REGION 1..9: note = Description of Artificial Sequence: Synthetic peptide
QQLKDYPIT

SEQ ID NO: 538 - protein, 8 aa, synthetic construct
  REGION 1..8: note = Description of Artificial Sequence: Synthetic peptide
GFSLSHFS

SEQ ID NO: 539 - protein, 8 aa, synthetic construct
  REGION 1..8: note = Description of Artificial Sequence: Synthetic peptide
FDPEEGGT

SEQ ID NO: 540 - protein, 14 aa, synthetic construct
  REGION 1..14: note = Description of Artificial Sequence: Synthetic peptide
ATGIWYSSGWPVDY

SEQ ID NO: 541 - protein, 11 aa, synthetic construct
  REGION 1..11: note = Description of Artificial Sequence: Synthetic peptide
QSLLDSSGYNY

SEQ ID NO: 542 - skipped

SEQ ID NO: 543 - protein, 9 aa, synthetic construct
  REGION 1..9: note = Description of Artificial Sequence: Synthetic peptide
MQALQTPIT

SEQ ID NO: 544 - protein, 8 aa, synthetic construct
  REGION 1..8: note = Description of Artificial Sequence: Synthetic peptide
GYTLTELS

SEQ ID NO: 545 - protein, 8 aa, synthetic construct
  REGION 1..8: note = Description of Artificial Sequence: Synthetic peptide
FDPEDGET

SEQ ID NO: 546 - protein, 18 aa, synthetic construct
  REGION 1..18: note = Description of Artificial Sequence: Synthetic peptide
ATVSRVRGVINYYYYMDV

SEQ ID NO: 547 - protein, 11 aa, synthetic construct
  REGION 1..11: note = Description of Artificial Sequence: Synthetic peptide
QSLLYRNGNNY

SEQ ID NO: 548 - skipped

SEQ ID NO: 549 - protein, 9 aa, synthetic construct
  REGION 1..9: note = Description of Artificial Sequence: Synthetic peptide
MQALQTPPT

SEQ ID NO: 550 - protein, 8 aa, synthetic construct
  REGION 1..8: note = Description of Artificial Sequence: Synthetic peptide
GGTFSSSA

SEQ ID NO: 551 - protein, 8 aa, synthetic construct
  REGION 1..8: note = Description of Artificial Sequence: Synthetic peptide
IIPIYGIT

SEQ ID NO: 552 - protein, 22 aa, synthetic construct
  REGION 1..22: note = Description of Artificial Sequence: Synthetic peptide
ARDDTARRVRGVPYYYYYAMDV

SEQ ID NO: 553 - protein, 6 aa, synthetic construct
  REGION 1..6: note = Description of Artificial Sequence: Synthetic peptide
QSVDSS

SEQ ID NO: 554 - skipped

SEQ ID NO: 555 - protein, 9 aa, synthetic construct
  REGION 1..9: note = Description of Artificial Sequence: Synthetic peptide
QQYKDWPFT

SEQ ID NO: 556 - protein, 8 aa, synthetic construct
  REGION 1..8: note = Description of Artificial Sequence: Synthetic peptide
GGTFGTYA

SEQ ID NO: 557 - protein, 8 aa, synthetic construct
  REGION 1..8: note = Description of Artificial Sequence: Synthetic peptide
ITPISATI

SEQ ID NO: 558 - protein, 13 aa, synthetic construct
  REGION 1..13: note = Description of Artificial Sequence: Synthetic peptide
ARGFEYSDGLLDD

SEQ ID NO: 559 - protein, 12 aa, synthetic construct
  REGION 1..12: note = Description of Artificial Sequence: Synthetic peptide
QSLFYSDDGNTY

SEQ ID NO: 560 - skipped

SEQ ID NO: 561 - protein, 9 aa, synthetic construct
  REGION 1..9: note = Description of Artificial Sequence: Synthetic peptide
MQHMEFPLT

SEQ ID NO: 562 - protein, 10 aa, synthetic construct
  REGION 1..10: note = Description of Artificial Sequence: Synthetic peptide
GGSISSSSYY

SEQ ID NO: 563 - protein, 7 aa, synthetic construct
  REGION 1..7: note = Description of Artificial Sequence: Synthetic peptide
IYYSGST

SEQ ID NO: 564 - protein, 15 aa, synthetic construct
  REGION 1..15: note = Description of Artificial Sequence: Synthetic peptide
ARGAWELRLGDWFDP

SEQ ID NO: 565 - protein, 9 aa, synthetic construct
  REGION 1..9: note = Description of Artificial Sequence: Synthetic peptide
SSNIGAGYD

SEQ ID NO: 566 - skipped

SEQ ID NO: 567 - protein, 12 aa, synthetic construct
  REGION 1..12: note = Description of Artificial Sequence: Synthetic peptide
QSYDSSLSIYVV

SEQ ID NO: 568 - protein, 9 aa, synthetic construct
  REGION 1..9: note = Description of Artificial Sequence: Synthetic peptide
SGSISSTNW

SEQ ID NO: 569 - protein, 7 aa, synthetic construct
  REGION 1..7: note = Description of Artificial Sequence: Synthetic peptide
IYHSGST

SEQ ID NO: 570 - protein, 10 aa, synthetic construct
  REGION 1..10: note = Description of Artificial Sequence: Synthetic peptide
ARVGPAAIYY

SEQ ID NO: 571 - protein, 8 aa, synthetic construct
  REGION 1..8: note = Description of Artificial Sequence: Synthetic peptide
SNNVGYEG

SEQ ID NO: 572 - skipped

SEQ ID NO: 573 - protein, 11 aa, synthetic construct
  REGION 1..11: note = Description of Artificial Sequence: Synthetic peptide
SAWDSSLNAVV

SEQ ID NO: 574 - protein, 8 aa, synthetic construct
  REGION 1..8: note = Description of Artificial Sequence: Synthetic peptide
GYTLTELS

SEQ ID NO: 575 - protein, 8 aa, synthetic construct
  REGION 1..8: note = Description of Artificial Sequence: Synthetic peptide
FDPEDGET

SEQ ID NO: 576 - protein, 21 aa, synthetic construct
  REGION 1..21: note = Description of Artificial Sequence: Synthetic peptide
ATAKPGIAVAGQNYYYYYMDV

SEQ ID NO: 577 - protein, 11 aa, synthetic construct
  REGION 1..11: note = Description of Artificial Sequence: Synthetic peptide
QSLLYRNGNNY

SEQ ID NO: 578 - skipped

SEQ ID NO: 579 - protein, 9 aa, synthetic construct
  REGION 1..9: note = Description of Artificial Sequence: Synthetic peptide
MQALQTPPT

SEQ ID NO: 580 - protein, 8 aa, synthetic construct
  REGION 1..8: note = Description of Artificial Sequence: Synthetic peptide
GFTFSSYA

SEQ ID NO: 581 - protein, 8 aa, synthetic construct
  REGION 1..8: note = Description of Artificial Sequence: Synthetic peptide
ISYDGSNK

SEQ ID NO: 582 - protein, 17 aa, synthetic construct
  REGION 1..17: note = Description of Artificial Sequence: Synthetic peptide
ASSPIGYSYGYWGGMDV

SEQ ID NO: 583 - protein, 9 aa, synthetic construct
  REGION 1..9: note = Description of Artificial Sequence: Synthetic peptide
SGIDVRTNK

SEQ ID NO: 584 - protein, 7 aa, synthetic construct
  REGION 1..7: note = Description of Artificial Sequence: Synthetic peptide
FQSDSDK

SEQ ID NO: 585 - protein, 9 aa, synthetic construct
  REGION 1..9: note = Description of Artificial Sequence: Synthetic peptide
LIWHTSGWV

SEQ ID NO: 586 - protein, 8 aa, synthetic construct
  REGION 1..8: note = Description of Artificial Sequence: Synthetic peptide
GYTLTELS

SEQ ID NO: 587 - protein, 8 aa, synthetic construct
  REGION 1..8: note = Description of Artificial Sequence: Synthetic peptide
FDPEDGET

SEQ ID NO: 588 - protein, 17 aa, synthetic construct
  REGION 1..17: note = Description of Artificial Sequence: Synthetic peptide
ATGPAAAGVGYYYYMDV

SEQ ID NO: 589 - protein, 11 aa, synthetic construct
  REGION 1..11: note = Description of Artificial Sequence: Synthetic peptide
QSLLYRNGYNY

SEQ ID NO: 590 - skipped

SEQ ID NO: 591 - protein, 9 aa, synthetic construct
  REGION 1..9: note = Description of Artificial Sequence: Synthetic peptide
MQALQTPPT

SEQ ID NO: 592 - protein, 8 aa, synthetic construct
  REGION 1..8: note = Description of Artificial Sequence: Synthetic peptide
GFTFSSYA

SEQ ID NO: 593 - protein, 8 aa, synthetic construct
  REGION 1..8: note = Description of Artificial Sequence: Synthetic peptide
ISYDGSNK

SEQ ID NO: 594 - protein, 20 aa, synthetic construct
  REGION 1..20: note = Description of Artificial Sequence: Synthetic peptide
ARDVMVYCSSTSCYFYGMDV

SEQ ID NO: 595 - protein, 6 aa, synthetic construct
  REGION 1..6: note = Description of Artificial Sequence: Synthetic peptide
QDIRDY

SEQ ID NO: 596 - skipped

SEQ ID NO: 597 - protein, 9 aa, synthetic construct
  REGION 1..9: note = Description of Artificial Sequence: Synthetic peptide
QQFENLPIT

SEQ ID NO: 598 - protein, 8 aa, synthetic construct
  REGION 1..8: note = Description of Artificial Sequence: Synthetic peptide
GYTLTELS

SEQ ID NO: 599 - protein, 8 aa, synthetic construct
  REGION 1..8: note = Description of Artificial Sequence: Synthetic peptide
FDPEDGET

SEQ ID NO: 600 - protein, 18 aa, synthetic construct
  REGION 1..18: note = Description of Artificial Sequence: Synthetic peptide
ATGGYSSGFNYYYYYMDV

SEQ ID NO: 601 - protein, 11 aa, synthetic construct
  REGION 1..11: note = Description of Artificial Sequence: Synthetic peptide
QSLLYRNGNNY

SEQ ID NO: 602 - skipped

SEQ ID NO: 603 - protein, 9 aa, synthetic construct
  REGION 1..9: note = Description of Artificial Sequence: Synthetic peptide
MQALQTPPT

SEQ ID NO: 604 - protein, 8 aa, synthetic construct
  REGION 1..8: note = Description of Artificial Sequence: Synthetic peptide
GYTLTELS

SEQ ID NO: 605 - protein, 8 aa, synthetic construct
  REGION 1..8: note = Description of Artificial Sequence: Synthetic peptide
FDPEDGET

SEQ ID NO: 606 - protein, 14 aa, synthetic construct
  REGION 1..14: note = Description of Artificial Sequence: Synthetic peptide
ATGVTTYYYYGMDV

SEQ ID NO: 607 - protein, 11 aa, synthetic construct
  REGION 1..11: note = Description of Artificial Sequence: Synthetic peptide
QSLLYSNGNNF

SEQ ID NO: 608 - skipped

SEQ ID NO: 609 - protein, 9 aa, synthetic construct
  REGION 1..9: note = Description of Artificial Sequence: Synthetic peptide
MQALQTPPT

SEQ ID NO: 610 - protein, 8 aa, synthetic construct
  REGION 1..8: note = Description of Artificial Sequence: Synthetic peptide
GFTFSSYG

SEQ ID NO: 611 - protein, 8 aa, synthetic construct
  REGION 1..8: note = Description of Artificial Sequence: Synthetic peptide
IRYDGSNK

SEQ ID NO: 612 - protein, 14 aa, synthetic construct
  REGION 1..14: note = Description of Artificial Sequence: Synthetic peptide
ARDLFDFWWDGMDV

SEQ ID NO: 613 - protein, 7 aa, synthetic construct
  REGION 1..7: note = Description of Artificial Sequence: Synthetic peptide
QSVSSMY

SEQ ID NO: 614 - skipped

SEQ ID NO: 615 - protein, 10 aa, synthetic construct
  REGION 1..10: note = Description of Artificial Sequence: Synthetic peptide
QQYVSSPMYT

SEQ ID NO: 616 - protein, 8 aa, synthetic construct
  REGION 1..8: note = Description of Artificial Sequence: Synthetic peptide
GGTFSSSA

SEQ ID NO: 617 - protein, 8 aa, synthetic construct
  REGION 1..8: note = Description of Artificial Sequence: Synthetic peptide
IIPIYGIT

SEQ ID NO: 618 - protein, 22 aa, synthetic construct
  REGION 1..22: note = Description of Artificial Sequence: Synthetic peptide
ARDDTARRVRGVPYYYYYAMDV

SEQ ID NO: 619 - protein, 6 aa, synthetic construct
  REGION 1..6: note = Description of Artificial Sequence: Synthetic peptide
QSVSSY

SEQ ID NO: 620 - skipped

SEQ ID NO: 621 - protein, 9 aa, synthetic construct
  REGION 1..9: note = Description of Artificial Sequence: Synthetic peptide
QQYDDWPQT

SEQ ID NO: 622 - protein, 8 aa, synthetic construct
  REGION 1..8: note = Description of Artificial Sequence: Synthetic peptide
GGTFNNYG

SEQ ID NO: 623 - protein, 8 aa, synthetic construct
  REGION 1..8: note = Description of Artificial Sequence: Synthetic peptide
IIPLFGTT

SEQ ID NO: 624 - protein, 15 aa, synthetic construct
  REGION 1..15: note = Description of Artificial Sequence: Synthetic peptide
ARDRMAADGMAVFDY

SEQ ID NO: 625 - protein, 8 aa, synthetic construct
  REGION 1..8: note = Description of Artificial Sequence: Synthetic peptide
SSNIGRHF

SEQ ID NO: 626 - skipped

SEQ ID NO: 627 - protein, 11 aa, synthetic construct
  REGION 1..11: note = Description of Artificial Sequence: Synthetic peptide
SSWDAALNGVV

SEQ ID NO: 628 - protein, 8 aa, synthetic construct
  REGION 1..8: note = Description of Artificial Sequence: Synthetic peptide
GYTLTELS

SEQ ID NO: 629 - protein, 8 aa, synthetic construct
  REGION 1..8: note = Description of Artificial Sequence: Synthetic peptide
FDPEDGET

SEQ ID NO: 630 - protein, 19 aa, synthetic construct
  REGION 1..19: note = Description of Artificial Sequence: Synthetic peptide
ATEVPMVRGARRYYYYMDV

SEQ ID NO: 631 - protein, 11 aa, synthetic construct
  REGION 1..11: note = Description of Artificial Sequence: Synthetic peptide
QTLLYINENNY

SEQ ID NO: 632 - skipped

SEQ ID NO: 633 - protein, 9 aa, synthetic construct
  REGION 1..9: note = Description of Artificial Sequence: Synthetic peptide
MQGLQTPPT

SEQ ID NO: 634 - protein, 10 aa, synthetic construct
  REGION 1..10: note = Description of Artificial Sequence: Synthetic peptide
GGSISNSNYY

SEQ ID NO: 635 - protein, 7 aa, synthetic construct
  REGION 1..7: note = Description of Artificial Sequence: Synthetic peptide
IYYSGST

SEQ ID NO: 636 - protein, 15 aa, synthetic construct
  REGION 1..15: note = Description of Artificial Sequence: Synthetic peptide
ARGAWELSLGDWFDP

SEQ ID NO: 637 - protein, 9 aa, synthetic construct
  REGION 1..9: note = Description of Artificial Sequence: Synthetic peptide
SSNIGAGYD

SEQ ID NO: 638 - skipped

SEQ ID NO: 639 - protein, 12 aa, synthetic construct
  REGION 1..12: note = Description of Artificial Sequence: Synthetic peptide
QSYDSSLSVYVV

SEQ ID NO: 640 - protein, 8 aa, synthetic construct
  REGION 1..8: note = Description of Artificial Sequence: Synthetic peptide
GGTFSSSA

SEQ ID NO: 641 - protein, 8 aa, synthetic construct
  REGION 1..8: note = Description of Artificial Sequence: Synthetic peptide
IIPIYGIT

SEQ ID NO: 642 - protein, 22 aa, synthetic construct
  REGION 1..22: note = Description of Artificial Sequence: Synthetic peptide
ARDDTARRVRGVPYYYYYAMDV

SEQ ID NO: 643 - protein, 6 aa, synthetic construct
  REGION 1..6: note = Description of Artificial Sequence: Synthetic peptide
QNVYGE

SEQ ID NO: 644 - skipped

SEQ ID NO: 645 - protein, 9 aa, synthetic construct
  REGION 1..9: note = Description of Artificial Sequence: Synthetic peptide
QQRRDWPIT

SEQ ID NO: 646 - protein, 8 aa, synthetic construct
  REGION 1..8: note = Description of Artificial Sequence: Synthetic peptide
GFTFGTSS

SEQ ID NO: 647 - protein, 8 aa, synthetic construct
  REGION 1..8: note = Description of Artificial Sequence: Synthetic peptide
ISFDGTEI

SEQ ID NO: 648 - protein, 15 aa, synthetic construct
  REGION 1..15: note = Description of Artificial Sequence: Synthetic peptide
AKGSGNIYFYSGMDV

SEQ ID NO: 649 - protein, 6 aa, synthetic construct
  REGION 1..6: note = Description of Artificial Sequence: Synthetic peptide
QSISGW

SEQ ID NO: 650 - skipped

SEQ ID NO: 651 - protein, 9 aa, synthetic construct
  REGION 1..9: note = Description of Artificial Sequence: Synthetic peptide
QQYYSYPLT

SEQ ID NO: 652 - protein, 8 aa, synthetic construct
  REGION 1..8: note = Description of Artificial Sequence: Synthetic peptide
GYTLTELS

SEQ ID NO: 653 - protein, 8 aa, synthetic construct
  REGION 1..8: note = Description of Artificial Sequence: Synthetic peptide
FDPEDGET

SEQ ID NO: 654 - protein, 19 aa, synthetic construct
  REGION 1..19: note = Description of Artificial Sequence: Synthetic peptide
ATGVPAAIGVYYYYYYMDV

SEQ ID NO: 655 - protein, 11 aa, synthetic construct
  REGION 1..11: note = Description of Artificial Sequence: Synthetic peptide
QSLLYSNGYNY

SEQ ID NO: 656 - skipped

SEQ ID NO: 657 - protein, 9 aa, synthetic construct
  REGION 1..9: note = Description of Artificial Sequence: Synthetic peptide
MQALQSPVT

SEQ ID NO: 658 - protein, 8 aa, synthetic construct
  REGION 1..8: note = Description of Artificial Sequence: Synthetic peptide
GYTLTELS

SEQ ID NO: 659 - protein, 8 aa, synthetic construct
  REGION 1..8: note = Description of Artificial Sequence: Synthetic peptide
FDPEDGET

SEQ ID NO: 660 - protein, 20 aa, synthetic construct
  REGION 1..20: note = Description of Artificial Sequence: Synthetic peptide
ATDSRDGPAARGGYYYYMDV

SEQ ID NO: 661 - protein, 11 aa, synthetic construct
  REGION 1..11: note = Description of Artificial Sequence: Synthetic peptide
QSLLYINGYNY

SEQ ID NO: 662 - skipped

SEQ ID NO: 663 - protein, 9 aa, synthetic construct
  REGION 1..9: note = Description of Artificial Sequence: Synthetic peptide
MQALQTPPT

SEQ ID NO: 664 - protein, 8 aa, synthetic construct
  REGION 1..8: note = Description of Artificial Sequence: Synthetic peptide
GGTFSSYA

SEQ ID NO: 665 - protein, 8 aa, synthetic construct
  REGION 1..8: note = Description of Artificial Sequence: Synthetic peptide
IIPIFGTA

SEQ ID NO: 666 - protein, 20 aa, synthetic construct
  REGION 1..20: note = Description of Artificial Sequence: Synthetic peptide
ARDAYYYDSSGYYNPDAFDI

SEQ ID NO: 667 - protein, 11 aa, synthetic construct
  REGION 1..11: note = Description of Artificial Sequence: Synthetic peptide
QSLLHSNGYNY

SEQ ID NO: 668 - skipped

SEQ ID NO: 669 - protein, 9 aa, synthetic construct
  REGION 1..9: note = Description of Artificial Sequence: Synthetic peptide
MQGLQTPRT

SEQ ID NO: 670 - protein, 10 aa, synthetic construct
  REGION 1..10: note = Description of Artificial Sequence: Synthetic peptide
GFSLTSGGMS

SEQ ID NO: 671 - protein, 7 aa, synthetic construct
  REGION 1..7: note = Description of Artificial Sequence: Synthetic peptide
IDWNDDK

SEQ ID NO: 672 - protein, 12 aa, synthetic construct
  REGION 1..12: note = Description of Artificial Sequence: Synthetic peptide
ARIRGMTWGFDS

SEQ ID NO: 673 - protein, 7 aa, synthetic construct
  REGION 1..7: note = Description of Artificial Sequence: Synthetic peptide
QSVSSSY

SEQ ID NO: 674 - skipped

SEQ ID NO: 675 - protein, 9 aa, synthetic construct
  REGION 1..9: note = Description of Artificial Sequence: Synthetic peptide
QQYGTTPFA

SEQ ID NO: 676 - protein, 8 aa, synthetic construct
  REGION 1..8: note = Description of Artificial Sequence: Synthetic peptide
GYTFTAYY

SEQ ID NO: 677 - protein, 8 aa, synthetic construct
  REGION 1..8: note = Description of Artificial Sequence: Synthetic peptide
INPNSGGT

SEQ ID NO: 678 - protein, 21 aa, synthetic construct
  REGION 1..21: note = Description of Artificial Sequence: Synthetic peptide
ARDGAFYYGSENYYNAGWFDP

SEQ ID NO: 679 - protein, 11 aa, synthetic construct
  REGION 1..11: note = Description of Artificial Sequence: Synthetic peptide
QSLLSGNGYNY

SEQ ID NO: 680 - skipped

SEQ ID NO: 681 - protein, 9 aa, synthetic construct
  REGION 1..9: note = Description of Artificial Sequence: Synthetic peptide
MQALKSPLT

SEQ ID NO: 682 - protein, 8 aa, synthetic construct
  REGION 1..8: note = Description of Artificial Sequence: Synthetic peptide
GYTFTNYY

SEQ ID NO: 683 - protein, 8 aa, synthetic construct
  REGION 1..8: note = Description of Artificial Sequence: Synthetic peptide
INPSGGIT

SEQ ID NO: 684 - protein, 18 aa, synthetic construct
  REGION 1..18: note = Description of Artificial Sequence: Synthetic peptide
ARAGLGYNWNYAPSGMDV

SEQ ID NO: 685 - protein, 9 aa, synthetic construct
  REGION 1..9: note = Description of Artificial Sequence: Synthetic peptide
SSDVGGYNY

SEQ ID NO: 686 - skipped

SEQ ID NO: 687 - protein, 10 aa, synthetic construct
  REGION 1..10: note = Description of Artificial Sequence: Synthetic peptide
SSYAGSNNLV

SEQ ID NO: 688 - protein, 10 aa, synthetic construct
  REGION 1..10: note = Description of Artificial Sequence: Synthetic peptide
GGSISSSSYY

SEQ ID NO: 689 - protein, 7 aa, synthetic construct
  REGION 1..7: note = Description of Artificial Sequence: Synthetic peptide
IYYSGST

SEQ ID NO: 690 - protein, 15 aa, synthetic construct
  REGION 1..15: note = Description of Artificial Sequence: Synthetic peptide
ARGAWELRLGDWFDP

SEQ ID NO: 691 - protein, 9 aa, synthetic construct
  REGION 1..9: note = Description of Artificial Sequence: Synthetic peptide
SSNIGAGYD

SEQ ID NO: 692 - skipped

SEQ ID NO: 693 - protein, 12 aa, synthetic construct
  REGION 1..12: note = Description of Artificial Sequence: Synthetic peptide
QSYDSSLSVYVV

SEQ ID NO: 694 - protein, 8 aa, synthetic construct
  REGION 1..8: note = Description of Artificial Sequence: Synthetic peptide
GFTFDDYA

SEQ ID NO: 695 - protein, 8 aa, synthetic construct
  REGION 1..8: note = Description of Artificial Sequence: Synthetic peptide
ISWNSGSI

SEQ ID NO: 696 - protein, 15 aa, synthetic construct
  REGION 1..15: note = Description of Artificial Sequence: Synthetic peptide
AKDVNRILVAGMVDY

SEQ ID NO: 697 - protein, 11 aa, synthetic construct
  REGION 1..11: note = Description of Artificial Sequence: Synthetic peptide
QSLLHSNGYNY

SEQ ID NO: 698 - skipped

SEQ ID NO: 699 - protein, 9 aa, synthetic construct
  REGION 1..9: note = Description of Artificial Sequence: Synthetic peptide
MQGLQTPIT

SEQ ID NO: 700 - protein, 8 aa, synthetic construct
  REGION 1..8: note = Description of Artificial Sequence: Synthetic peptide
RFTFEDYA

SEQ ID NO: 701 - protein, 8 aa, synthetic construct
  REGION 1..8: note = Description of Artificial Sequence: Synthetic peptide
ISWKSGGI

SEQ ID NO: 702 - protein, 15 aa, synthetic construct
  REGION 1..15: note = Description of Artificial Sequence: Synthetic peptide
VKDPTLVATDRAFNI

SEQ ID NO: 703 - protein, 11 aa, synthetic construct
  REGION 1..11: note = Description of Artificial Sequence: Synthetic peptide
QSLLHSNGYNY

SEQ ID NO: 704 - skipped

SEQ ID NO: 705 - protein, 9 aa, synthetic construct
  REGION 1..9: note = Description of Artificial Sequence: Synthetic peptide
MQYLQTPDT

SEQ ID NO: 706 - protein, 8 aa, synthetic construct
  REGION 1..8: note = Description of Artificial Sequence: Synthetic peptide
GGTFSSSA

SEQ ID NO: 707 - protein, 8 aa, synthetic construct
  REGION 1..8: note = Description of Artificial Sequence: Synthetic peptide
IIPIYGIT

SEQ ID NO: 708 - protein, 22 aa, synthetic construct
  REGION 1..22: note = Description of Artificial Sequence: Synthetic peptide
ARDDTARRVRGVPYYYYYAMDV

SEQ ID NO: 709 - protein, 12 aa, synthetic construct
  REGION 1..12: note = Description of Artificial Sequence: Synthetic peptide
QSLLDSDDGNIH

SEQ ID NO: 710 - skipped

SEQ ID NO: 711 - protein, 9 aa, synthetic construct
  REGION 1..9: note = Description of Artificial Sequence: Synthetic peptide
MQRKEFPLT

SEQ ID NO: 712 - protein, 8 aa, synthetic construct
  REGION 1..8: note = Description of Artificial Sequence: Synthetic peptide
GFTFSSYG

SEQ ID NO: 713 - protein, 8 aa, synthetic construct
  REGION 1..8: note = Description of Artificial Sequence: Synthetic peptide
ISYDGSNK

SEQ ID NO: 714 - protein, 18 aa, synthetic construct
  REGION 1..18: note = Description of Artificial Sequence: Synthetic peptide
AKEDRLRFLEWLFYGMDV

SEQ ID NO: 715 - protein, 6 aa, synthetic construct
  REGION 1..6: note = Description of Artificial Sequence: Synthetic peptide
HDIYTY

SEQ ID NO: 716 - skipped

SEQ ID NO: 717 - protein, 11 aa, synthetic construct
  REGION 1..11: note = Description of Artificial Sequence: Synthetic peptide
QQYDNHPPEVT

SEQ ID NO: 718 - protein, 8 aa, synthetic construct
  REGION 1..8: note = Description of Artificial Sequence: Synthetic peptide
GGTFSSSA

SEQ ID NO: 719 - protein, 8 aa, synthetic construct
  REGION 1..8: note = Description of Artificial Sequence: Synthetic peptide
IIPIYGIT

SEQ ID NO: 720 - protein, 22 aa, synthetic construct
  REGION 1..22: note = Description of Artificial Sequence: Synthetic peptide
ARDDTARRVRGVPYYYYYAMDV

SEQ ID NO: 721 - protein, 6 aa, synthetic construct
  REGION 1..6: note = Description of Artificial Sequence: Synthetic peptide
QDIDDD

SEQ ID NO: 722 - skipped

SEQ ID NO: 723 - protein, 9 aa, synthetic construct
  REGION 1..9: note = Description of Artificial Sequence: Synthetic peptide
LQHDNLPLT

SEQ ID NO: 724 - protein, 8 aa, synthetic construct
  REGION 1..8: note = Description of Artificial Sequence: Synthetic peptide
GYTLTELS

SEQ ID NO: 725 - protein, 8 aa, synthetic construct
  REGION 1..8: note = Description of Artificial Sequence: Synthetic peptide
FDPEDGET

SEQ ID NO: 726 - protein, 19 aa, synthetic construct
  REGION 1..19: note = Description of Artificial Sequence: Synthetic peptide
ATEDPGPVAGPYYYYGMDV

SEQ ID NO: 727 - protein, 11 aa, synthetic construct
  REGION 1..11: note = Description of Artificial Sequence: Synthetic peptide
QSLLYINGYHY

SEQ ID NO: 728 - skipped

SEQ ID NO: 729 - protein, 9 aa, synthetic construct
  REGION 1..9: note = Description of Artificial Sequence: Synthetic peptide
MQALQTPPT

SEQ ID NO: 730 - protein, 8 aa, synthetic construct
  REGION 1..8: note = Description of Artificial Sequence: Synthetic peptide
GYMFTNYP

SEQ ID NO: 731 - protein, 8 aa, synthetic construct
  REGION 1..8: note = Description of Artificial Sequence: Synthetic peptide
INAGTGNT

SEQ ID NO: 732 - protein, 21 aa, synthetic construct
  REGION 1..21: note = Description of Artificial Sequence: Synthetic peptide
AREGMFYYGLESYYKGGWFDP

SEQ ID NO: 733 - protein, 11 aa, synthetic construct
  REGION 1..11: note = Description of Artificial Sequence: Synthetic peptide
QSLLHRNGYNY

SEQ ID NO: 734 - skipped

SEQ ID NO: 735 - protein, 9 aa, synthetic construct
  REGION 1..9: note = Description of Artificial Sequence: Synthetic peptide
MQALQTPLT

SEQ ID NO: 736 - protein, 8 aa, synthetic construct
  REGION 1..8: note = Description of Artificial Sequence: Synthetic peptide
GGTFSSSA

SEQ ID NO: 737 - protein, 8 aa, synthetic construct
  REGION 1..8: note = Description of Artificial Sequence: Synthetic peptide
IIPIYGIT

SEQ ID NO: 738 - protein, 22 aa, synthetic construct
  REGION 1..22: note = Description of Artificial Sequence: Synthetic peptide
ARDDTARRVRGVPYYYYYAMDV

SEQ ID NO: 739 - protein, 12 aa, synthetic construct
  REGION 1..12: note = Description of Artificial Sequence: Synthetic peptide
QSLLDSDDGNTY

SEQ ID NO: 740 - skipped

SEQ ID NO: 741 - protein, 9 aa, synthetic construct
  REGION 1..9: note = Description of Artificial Sequence: Synthetic peptide
MQRLQFPLT

SEQ ID NO: 742 - protein, 8 aa, synthetic construct
  REGION 1..8: note = Description of Artificial Sequence: Synthetic peptide
TYTFTTYY

SEQ ID NO: 743 - protein, 8 aa, synthetic construct
  REGION 1..8: note = Description of Artificial Sequence: Synthetic peptide
IYPSGGNT

SEQ ID NO: 744 - protein, 13 aa, synthetic construct
  REGION 1..13: note = Description of Artificial Sequence: Synthetic peptide
VRDQNYYYSAMDV

SEQ ID NO: 745 - protein, 6 aa, synthetic construct
  REGION 1..6: note = Description of Artificial Sequence: Synthetic peptide
QDIRNY

SEQ ID NO: 746 - skipped

SEQ ID NO: 747 - protein, 9 aa, synthetic construct
  REGION 1..9: note = Description of Artificial Sequence: Synthetic peptide
QQFENLPIT

SEQ ID NO: 748 - protein, 8 aa, synthetic construct
  REGION 1..8: note = Description of Artificial Sequence: Synthetic peptide
GGTFSSSA

SEQ ID NO: 749 - protein, 8 aa, synthetic construct
  REGION 1..8: note = Description of Artificial Sequence: Synthetic peptide
IIPIYGIT

SEQ ID NO: 750 - protein, 22 aa, synthetic construct
  REGION 1..22: note = Description of Artificial Sequence: Synthetic peptide
ARDDTARRVRGVPYYYYYAMDV

SEQ ID NO: 751 - protein, 6 aa, synthetic construct
  REGION 1..6: note = Description of Artificial Sequence: Synthetic peptide
RDISDS

SEQ ID NO: 752 - skipped

SEQ ID NO: 753 - protein, 9 aa, synthetic construct
  REGION 1..9: note = Description of Artificial Sequence: Synthetic peptide
HQYDNLPLT

SEQ ID NO: 754 - protein, 8 aa, synthetic construct
  REGION 1..8: note = Description of Artificial Sequence: Synthetic peptide
GFNFRGYA

SEQ ID NO: 755 - protein, 8 aa, synthetic construct
  REGION 1..8: note = Description of Artificial Sequence: Synthetic peptide
ISGSGGTT

SEQ ID NO: 756 - protein, 15 aa, synthetic construct
  REGION 1..15: note = Description of Artificial Sequence: Synthetic peptide
AQSYAQIGYGGHIDH

SEQ ID NO: 757 - protein, 9 aa, synthetic construct
  REGION 1..9: note = Description of Artificial Sequence: Synthetic peptide
SGIDVATYM

SEQ ID NO: 758 - protein, 7 aa, synthetic construct
  REGION 1..7: note = Description of Artificial Sequence: Synthetic peptide
YKSDSDK

SEQ ID NO: 759 - protein, 9 aa, synthetic construct
  REGION 1..9: note = Description of Artificial Sequence: Synthetic peptide
LIWHGSHYV

SEQ ID NO: 760 - protein, 8 aa, synthetic construct
  REGION 1..8: note = Description of Artificial Sequence: Synthetic peptide
GYTLTELS

SEQ ID NO: 761 - protein, 8 aa, synthetic construct
  REGION 1..8: note = Description of Artificial Sequence: Synthetic peptide
FDPEDGET

SEQ ID NO: 762 - protein, 19 aa, synthetic construct
  REGION 1..19: note = Description of Artificial Sequence: Synthetic peptide
ATGVPAAIGVYYYYYYMDV

SEQ ID NO: 763 - protein, 11 aa, synthetic construct
  REGION 1..11: note = Description of Artificial Sequence: Synthetic peptide
QSLLYRNGYNY

SEQ ID NO: 764 - skipped

SEQ ID NO: 765 - protein, 9 aa, synthetic construct
  REGION 1..9: note = Description of Artificial Sequence: Synthetic peptide
MQAVQNPPT

SEQ ID NO: 766 - protein, 8 aa, synthetic construct
  REGION 1..8: note = Description of Artificial Sequence: Synthetic peptide
GGTFSSSA

SEQ ID NO: 767 - protein, 8 aa, synthetic construct
  REGION 1..8: note = Description of Artificial Sequence: Synthetic peptide
IIPIYGIT

SEQ ID NO: 768 - protein, 22 aa, synthetic construct
  REGION 1..22: note = Description of Artificial Sequence: Synthetic peptide
ARDDTARRVRGVPYYYYYAMDV

SEQ ID NO: 769 - protein, 6 aa, synthetic construct
  REGION 1..6: note = Description of Artificial Sequence: Synthetic peptide
QNIDSS

SEQ ID NO: 770 - skipped

SEQ ID NO: 771 - protein, 9 aa, synthetic construct
  REGION 1..9: note = Description of Artificial Sequence: Synthetic peptide
HQSSSLPLT

SEQ ID NO: 772 - protein, 8 aa, synthetic construct
  REGION 1..8: note = Description of Artificial Sequence: Synthetic peptide
GGTFSSSA

SEQ ID NO: 773 - protein, 8 aa, synthetic construct
  REGION 1..8: note = Description of Artificial Sequence: Synthetic peptide
IIPIYGIT

SEQ ID NO: 774 - protein, 22 aa, synthetic construct
  REGION 1..22: note = Description of Artificial Sequence: Synthetic peptide
ARDDTARRVRGVPYYYYYAMDV

SEQ ID NO: 775 - protein, 7 aa, synthetic construct
  REGION 1..7: note = Description of Artificial Sequence: Synthetic peptide
QSVYNNY

SEQ ID NO: 776 - skipped

SEQ ID NO: 777 - protein, 10 aa, synthetic construct
  REGION 1..10: note = Description of Artificial Sequence: Synthetic peptide
QQYNSWPPYT

SEQ ID NO: 778 - protein, 8 aa, synthetic construct
  REGION 1..8: note = Description of Artificial Sequence: Synthetic peptide
GGTFSSYA

SEQ ID NO: 779 - protein, 8 aa, synthetic construct
  REGION 1..8: note = Description of Artificial Sequence: Synthetic peptide
IIPIFGTA

SEQ ID NO: 780 - protein, 20 aa, synthetic construct
  REGION 1..20: note = Description of Artificial Sequence: Synthetic peptide
ARDAYYYDSSGYYNPDAFDI

SEQ ID NO: 781 - protein, 11 aa, synthetic construct
  REGION 1..11: note = Description of Artificial Sequence: Synthetic peptide
QSLLYSNGYNY

SEQ ID NO: 782 - skipped

SEQ ID NO: 783 - protein, 9 aa, synthetic construct
  REGION 1..9: note = Description of Artificial Sequence: Synthetic peptide
MQARQTPYT

SEQ ID NO: 784 - protein, 8 aa, synthetic construct
  REGION 1..8: note = Description of Artificial Sequence: Synthetic peptide
GGTFSSSA

SEQ ID NO: 785 - protein, 8 aa, synthetic construct
  REGION 1..8: note = Description of Artificial Sequence: Synthetic peptide
IIPIYGIT

SEQ ID NO: 786 - protein, 22 aa, synthetic construct
  REGION 1..22: note = Description of Artificial Sequence: Synthetic peptide
ARDDTARRVRGVPYYYYYAMDV

SEQ ID NO: 787 - protein, 6 aa, synthetic construct
  REGION 1..6: note = Description of Artificial Sequence: Synthetic peptide
ESVTTF

SEQ ID NO: 788 - skipped

SEQ ID NO: 789 - protein, 9 aa, synthetic construct
  REGION 1..9: note = Description of Artificial Sequence: Synthetic peptide
HQHTNWPLT

SEQ ID NO: 790 - protein, 8 aa, synthetic construct
  REGION 1..8: note = Description of Artificial Sequence: Synthetic peptide
GYTLTELS

SEQ ID NO: 791 - protein, 8 aa, synthetic construct
  REGION 1..8: note = Description of Artificial Sequence: Synthetic peptide
FDPEDGET

SEQ ID NO: 792 - protein, 22 aa, synthetic construct
  REGION 1..22: note = Description of Artificial Sequence: Synthetic peptide
ATEVGYCSGGSCYISYYYGMDV

SEQ ID NO: 793 - protein, 11 aa, synthetic construct
  REGION 1..11: note = Description of Artificial Sequence: Synthetic peptide
QSLLYRNGHNF

SEQ ID NO: 794 - skipped

SEQ ID NO: 795 - protein, 9 aa, synthetic construct
  REGION 1..9: note = Description of Artificial Sequence: Synthetic peptide
MQALQTPPT

SEQ ID NO: 796 - protein, 8 aa, synthetic construct
  REGION 1..8: note = Description of Artificial Sequence: Synthetic peptide
GGTFSSSA

SEQ ID NO: 797 - protein, 8 aa, synthetic construct
  REGION 1..8: note = Description of Artificial Sequence: Synthetic peptide
IIPIYGIT

SEQ ID NO: 798 - protein, 22 aa, synthetic construct
  REGION 1..22: note = Description of Artificial Sequence: Synthetic peptide
ARDDTARRVRGVPYYYYYAMDV

SEQ ID NO: 799 - protein, 6 aa, synthetic construct
  REGION 1..6: note = Description of Artificial Sequence: Synthetic peptide
QTMNNY

SEQ ID NO: 800 - skipped

SEQ ID NO: 801 - protein, 10 aa, synthetic construct
  REGION 1..10: note = Description of Artificial Sequence: Synthetic peptide
QQYGDWLPIT

SEQ ID NO: 802 - protein, 8 aa, synthetic construct
  REGION 1..8: note = Description of Artificial Sequence: Synthetic peptide
GYTLTELS

SEQ ID NO: 803 - protein, 8 aa, synthetic construct
  REGION 1..8: note = Description of Artificial Sequence: Synthetic peptide
FDPEDGET

SEQ ID NO: 804 - protein, 17 aa, synthetic construct
  REGION 1..17: note = Description of Artificial Sequence: Synthetic peptide
ATAFPEATISYYYYMDV

SEQ ID NO: 805 - protein, 11 aa, synthetic construct
  REGION 1..11: note = Description of Artificial Sequence: Synthetic peptide
QSLLYRNGYNY

SEQ ID NO: 806 - skipped

SEQ ID NO: 807 - protein, 9 aa, synthetic construct
  REGION 1..9: note = Description of Artificial Sequence: Synthetic peptide
MQAVQNPPT

SEQ ID NO: 808 - protein, 8 aa, synthetic construct
  REGION 1..8: note = Description of Artificial Sequence: Synthetic peptide
GGTFSSSA

SEQ ID NO: 809 - protein, 8 aa, synthetic construct
  REGION 1..8: note = Description of Artificial Sequence: Synthetic peptide
IIPIYGIT

SEQ ID NO: 810 - protein, 22 aa, synthetic construct
  REGION 1..22: note = Description of Artificial Sequence: Synthetic peptide
ARDDTARRVRGVPYYYYYAMDV

SEQ ID NO: 811 - protein, 12 aa, synthetic construct
  REGION 1..12: note = Description of Artificial Sequence: Synthetic peptide
RSLLDSDDGNTH

SEQ ID NO: 812 - skipped

SEQ ID NO: 813 - protein, 9 aa, synthetic construct
  REGION 1..9: note = Description of Artificial Sequence: Synthetic peptide
MQRKEFPLT

SEQ ID NO: 814 - protein, 8 aa, synthetic construct
  REGION 1..8: note = Description of Artificial Sequence: Synthetic peptide
GGTFSSYA

SEQ ID NO: 815 - protein, 8 aa, synthetic construct
  REGION 1..8: note = Description of Artificial Sequence: Synthetic peptide
IIPIFGTA

SEQ ID NO: 816 - protein, 21 aa, synthetic construct
  REGION 1..21: note = Description of Artificial Sequence: Synthetic peptide
ARGPWYYDSSGYSSYAYYMDV

SEQ ID NO: 817 - protein, 11 aa, synthetic construct
  REGION 1..11: note = Description of Artificial Sequence: Synthetic peptide
QSLLHSDGYNY

SEQ ID NO: 818 - skipped

SEQ ID NO: 819 - protein, 10 aa, synthetic construct
  REGION 1..10: note = Description of Artificial Sequence: Synthetic peptide
MQALHTPGVT

SEQ ID NO: 820 - protein, 121 aa, synthetic construct
  REGION 1..121: note = Description of Artificial Sequence: Synthetic polypeptide
DVQLVESGGDLVQPGGSRKLSCTASGFTFSNFGMHWVRQAPEKGLEWVAYISSGSSTIYYADTVKGRFTISRDNPENTLFLQMTSLRSEDTAMYYCTRLDYYTNSYSMDHWGQGTSVTVSS

SEQ ID NO: 821 - protein, 8 aa, synthetic construct
  REGION 1..8: note = Description of Artificial Sequence: Synthetic peptide
GFTFSNFG

SEQ ID NO: 822 - protein, 8 aa, synthetic construct
  REGION 1..8: note = Description of Artificial Sequence: Synthetic peptide
ISSGSSTI

SEQ ID NO: 823 - protein, 14 aa, synthetic construct
  REGION 1..14: note = Description of Artificial Sequence: Synthetic peptide
TRLDYYTNSYSMDH

SEQ ID NO: 824 - protein, 106 aa, synthetic construct
  REGION 1..106: note = Description of Artificial Sequence: Synthetic polypeptide
QIVLTQSPALMSASPGEKVTLTCSASSSLPYIYWYQQKPGSSPKPWIYLTSNLASGVPARFSGSRSGTSYSLTISSVEAEDAATYYCQQWSSNPFTFGSGTKLEIK

SEQ ID NO: 825 - protein, 5 aa, synthetic construct
  REGION 1..5: note = Description of Artificial Sequence: Synthetic peptide
SSLPY

SEQ ID NO: 826 - skipped

SEQ ID NO: 827 - protein, 9 aa, synthetic construct
  REGION 1..9: note = Description of Artificial Sequence: Synthetic peptide
QQWSSNPFT

SEQ ID NO: 828 - protein, 117 aa, synthetic construct
  REGION 1..117: note = Description of Artificial Sequence: Synthetic polypeptide
QVQLQQSGAELAKPGASVKMSCKASGYTFTSNWMHWVKQRPGQGLEWIGYINPSNGYTECNQKFRDKATLSADKSSSTAYMQLNSLTSADSAVYYCALMISAWLPYWGQGTLVTVSA

SEQ ID NO: 829 - protein, 8 aa, synthetic construct
  REGION 1..8: note = Description of Artificial Sequence: Synthetic peptide
GYTFTSNW

SEQ ID NO: 830 - protein, 8 aa, synthetic construct
  REGION 1..8: note = Description of Artificial Sequence: Synthetic peptide
INPSNGYT

SEQ ID NO: 831 - protein, 10 aa, synthetic construct
  REGION 1..10: note = Description of Artificial Sequence: Synthetic peptide
ALMISAWLPY

SEQ ID NO: 832 - protein, 111 aa, synthetic construct
  REGION 1..111: note = Description of Artificial Sequence: Synthetic polypeptide
DIVLTQSPASLAISLGQRATISCRASQSVSASSYSYVHWYQQKPGQPPKLLIKYASSLESGVPARFSGSGSGTDFTLNIHPVEEEDTATYYCLHTWEIPYTFGGGTKLEIK

SEQ ID NO: 833 - protein, 10 aa, synthetic construct
  REGION 1..10: note = Description of Artificial Sequence: Synthetic peptide
QSVSASSYSY

SEQ ID NO: 834 - skipped

SEQ ID NO: 835 - protein, 9 aa, synthetic construct
  REGION 1..9: note = Description of Artificial Sequence: Synthetic peptide
LHTWEIPYT

SEQ ID NO: 836 - protein, 116 aa, synthetic construct
  REGION 1..116: note = Description of Artificial Sequence: Synthetic polypeptide
QVQLQQSGAELTRPGASVNLSCKASGYTFTSYWMQWVKQRPGQGLEWIGAIYPGDGDTRFNQKFKGKATLTADESSSTAYMQLSSLASEDSAVYYCATYYRYDDYWGQGTTLTVSS

SEQ ID NO: 837 - protein, 8 aa, synthetic construct
  REGION 1..8: note = Description of Artificial Sequence: Synthetic peptide
GYTFTSYW

SEQ ID NO: 838 - protein, 8 aa, synthetic construct
  REGION 1..8: note = Description of Artificial Sequence: Synthetic peptide
IYPGDGDT

SEQ ID NO: 839 - protein, 9 aa, synthetic construct
  REGION 1..9: note = Description of Artificial Sequence: Synthetic peptide
ATYYRYDDY

SEQ ID NO: 840 - protein, 106 aa, synthetic construct
  REGION 1..106: note = Description of Artificial Sequence: Synthetic polypeptide
QIVLTQSPAIMSASPGEKVTMTCSASSSVSYMHWYQQKSGTSPKRWIYDTSKLASGVPTRFSGSGSGTSYSLTISSMEAEDAATYYCQQWSSNPYTFGGGTKLEIK

SEQ ID NO: 841 - protein, 5 aa, synthetic construct
  REGION 1..5: note = Description of Artificial Sequence: Synthetic peptide
SSVSY

SEQ ID NO: 842 - skipped

SEQ ID NO: 843 - protein, 9 aa, synthetic construct
  REGION 1..9: note = Description of Artificial Sequence: Synthetic peptide
QQWSSNPYT

SEQ ID NO: 844 - protein, 122 aa, synthetic construct
  REGION 1..122: note = Description of Artificial Sequence: Synthetic polypeptide
EVQLQQSGPDLVKPGASMKISCKASGYTFIDYNIHWVKQSQGKSLDWIGYIYPYNGGTGYNQKFKNKATLTVDSSSSTAYMEVRSLTFEDSAVYFCAREADYYGNRGQFDYWGQGTLVTVSA

SEQ ID NO: 845 - protein, 8 aa, synthetic construct
  REGION 1..8: note = Description of Artificial Sequence: Synthetic peptide
GYTFIDYN

SEQ ID NO: 846 - protein, 8 aa, synthetic construct
  REGION 1..8: note = Description of Artificial Sequence: Synthetic peptide
IYPYNGGT

SEQ ID NO: 847 - protein, 15 aa, synthetic construct
  REGION 1..15: note = Description of Artificial Sequence: Synthetic peptide
AREADYYGNRGQFDY

SEQ ID NO: 848 - protein, 107 aa, synthetic construct
  REGION 1..107: note = Description of Artificial Sequence: Synthetic polypeptide
DIQMTQSPASLSVSVGETVTITCRASENIFSNLAWYQQKQGKSPQLLVYGEANLADGVPSRFSGSGSGTQYSLKINSLQSEDFGNYYCQHFWGTPYTFGGGTTLEIK

SEQ ID NO: 849 - protein, 6 aa, synthetic construct
  REGION 1..6: note = Description of Artificial Sequence: Synthetic peptide
ENIFSN

SEQ ID NO: 850 - skipped

SEQ ID NO: 851 - protein, 9 aa, synthetic construct
  REGION 1..9: note = Description of Artificial Sequence: Synthetic peptide
QHFWGTPYT

SEQ ID NO: 852 - protein, 120 aa, synthetic construct
  REGION 1..120: note = Description of Artificial Sequence: Synthetic polypeptide
QVTLKESGPGILQPSQTLSLTCSFSGFSLNTSGTGVGWIRQPSGKGLEWLTHIWWNDNKFYNTFLKSRLTISKETSNNQVFLKIASVDTADAATYYCARMAYGNLWFVNWGQGTLVAVST

SEQ ID NO: 853 - protein, 10 aa, synthetic construct
  REGION 1..10: note = Description of Artificial Sequence: Synthetic peptide
GFSLNTSGTG

SEQ ID NO: 854 - protein, 7 aa, synthetic construct
  REGION 1..7: note = Description of Artificial Sequence: Synthetic peptide
IWWNDNK

SEQ ID NO: 855 - protein, 12 aa, synthetic construct
  REGION 1..12: note = Description of Artificial Sequence: Synthetic peptide
ARMAYGNLWFVN

SEQ ID NO: 856 - protein, 111 aa, synthetic construct
  REGION 1..111: note = Description of Artificial Sequence: Synthetic polypeptide
DIVLTQSPASLAVSLGQRASISCRASRSVTISGYSYMYWYQQKPGQPPRLLFYLASNLASGVPARFSGSGSGTDFTLNIHPVEEEDAAIYYCQHSRELPYTFGGGTKLEIK

SEQ ID NO: 857 - protein, 10 aa, synthetic construct
  REGION 1..10: note = Description of Artificial Sequence: Synthetic peptide
RSVTISGYSY

SEQ ID NO: 858 - skipped

SEQ ID NO: 859 - protein, 9 aa, synthetic construct
  REGION 1..9: note = Description of Artificial Sequence: Synthetic peptide
QHSRELPYT

SEQ ID NO: 860 - protein, 123 aa, synthetic construct
  REGION 1..123: note = Description of Artificial Sequence: Synthetic polypeptide
QIQLVQSGPELKKPRETVKISCKASGYTFTDYSMHWVKQAPGKGLKWMGWINTETGEPTYADDFKGRFAFSLEASASSAYLQINILKDEDTATYFCARSRGGYYEDYYALDYWGQGTSVTVSS

SEQ ID NO: 861 - protein, 8 aa, synthetic construct
  REGION 1..8: note = Description of Artificial Sequence: Synthetic peptide
GYTFTDYS

SEQ ID NO: 862 - protein, 8 aa, synthetic construct
  REGION 1..8: note = Description of Artificial Sequence: Synthetic peptide
INTETGEP

SEQ ID NO: 863 - protein, 16 aa, synthetic construct
  REGION 1..16: note = Description of Artificial Sequence: Synthetic peptide
ARSRGGYYEDYYALDY

SEQ ID NO: 864 - protein, 107 aa, synthetic construct
  REGION 1..107: note = Description of Artificial Sequence: Synthetic polypeptide
DIQMTQSPASLSASVGESVTITCRASGNIHYYLAWYQQKQGKSPQLLVYNAKNLADGVPSRFSGSGSGTQFSLKINSLQPEDFGSYYCQHFWISPPTFGGGTKLEIK

SEQ ID NO: 865 - protein, 6 aa, synthetic construct
  REGION 1..6: note = Description of Artificial Sequence: Synthetic peptide
GNIHYY

SEQ ID NO: 866 - skipped

SEQ ID NO: 867 - protein, 9 aa, synthetic construct
  REGION 1..9: note = Description of Artificial Sequence: Synthetic peptide
QHFWISPPT

SEQ ID NO: 868 - protein, 118 aa, synthetic construct
  REGION 1..118: note = Description of Artificial Sequence: Synthetic polypeptide
EVQLRQSGADLVKPGASVKLSCTASGFNIKDTYIDWVKQRPEQGLDWIGRIDPANGNTKYDPKFQGKATIITDTSSNTAYLQLSNLTSEDTAVYYCARYGSYPYFDYWGRGTTLAVSS

SEQ ID NO: 869 - protein, 8 aa, synthetic construct
  REGION 1..8: note = Description of Artificial Sequence: Synthetic peptide
GFNIKDTY

SEQ ID NO: 870 - protein, 8 aa, synthetic construct
  REGION 1..8: note = Description of Artificial Sequence: Synthetic peptide
IDPANGNT

SEQ ID NO: 871 - protein, 11 aa, synthetic construct
  REGION 1..11: note = Description of Artificial Sequence: Synthetic peptide
ARYGSYPYFDY

SEQ ID NO: 872 - protein, 107 aa, synthetic construct
  REGION 1..107: note = Description of Artificial Sequence: Synthetic polypeptide
SIVMTQTPKFLLISAGDRVTITCKASQSVRNDVAWYQQKPGQSPKLLMYYASNRYTGVPDRFTGSGYGTDFTFTISTVQAEDLAVYFCQQDYSSPPTFGGGTKLEIK

SEQ ID NO: 873 - protein, 6 aa, synthetic construct
  REGION 1..6: note = Description of Artificial Sequence: Synthetic peptide
QSVRND

SEQ ID NO: 874 - skipped

SEQ ID NO: 875 - protein, 9 aa, synthetic construct
  REGION 1..9: note = Description of Artificial Sequence: Synthetic peptide
QQDYSSPPT

SEQ ID NO: 876 - protein, 118 aa, synthetic construct
  REGION 1..118: note = Description of Artificial Sequence: Synthetic polypeptide
QVQLQQSGPELVRPGVSVKISCKVSGYTFTDYVMHWVKQSHAKSLEWIGIISPYSGNTNYNQNFKGKATMTVDKSSSTAYMALARLTSEDSAIYYCAREGDLPMFAYWGQGTLVTVSA

SEQ ID NO: 877 - protein, 8 aa, synthetic construct
  REGION 1..8: note = Description of Artificial Sequence: Synthetic peptide
GYTFTDYV

SEQ ID NO: 878 - protein, 8 aa, synthetic construct
  REGION 1..8: note = Description of Artificial Sequence: Synthetic peptide
ISPYSGNT

SEQ ID NO: 879 - protein, 11 aa, synthetic construct
  REGION 1..11: note = Description of Artificial Sequence: Synthetic peptide
AREGDLPMFAY

SEQ ID NO: 880 - protein, 106 aa, synthetic construct
  REGION 1..106: note = Description of Artificial Sequence: Synthetic polypeptide
QIVLTQSPTIMSASPGEKVTMTCSASSSVSYIYWYQQNPGSSPRLLIYDTSILASGVPFRFSGSGSGTSYSLTISRMEAEDAATYYCQQWTSYPLTFGSGTKLELK

SEQ ID NO: 881 - protein, 5 aa, synthetic construct
  REGION 1..5: note = Description of Artificial Sequence: Synthetic peptide
SSVSY

SEQ ID NO: 882 - skipped

SEQ ID NO: 883 - protein, 9 aa, synthetic construct
  REGION 1..9: note = Description of Artificial Sequence: Synthetic peptide
QQWTSYPLT

SEQ ID NO: 884 - protein, 120 aa, synthetic construct
  REGION 1..120: note = Description of Artificial Sequence: Synthetic polypeptide
EVQLQQSGPELVKPGASVKISCKASGYTFTDYNINWVKQSHGKSLEWIGYIYPYIGGSGYNQKFKSKATLSADNPSSTAYMELRSLTSEDSAVYYCAREDKTARNAMDYWGQGTPVTVSS

SEQ ID NO: 885 - protein, 8 aa, synthetic construct
  REGION 1..8: note = Description of Artificial Sequence: Synthetic peptide
GYTFTDYN

SEQ ID NO: 886 - protein, 8 aa, synthetic construct
  REGION 1..8: note = Description of Artificial Sequence: Synthetic peptide
IYPYIGGS

SEQ ID NO: 887 - protein, 13 aa, synthetic construct
  REGION 1..13: note = Description of Artificial Sequence: Synthetic peptide
AREDKTARNAMDY

SEQ ID NO: 888 - protein, 107 aa, synthetic construct
  REGION 1..107: note = Description of Artificial Sequence: Synthetic polypeptide
DIQMTQSPASLSVSVGETVTIICRVSENIYSNLAWYQQKQGKSPQLLVYEATNLAEGVPSRFSGSGSGTQYSLKINSLQSEDFGSYYCQHFWGTPYTFGGGTKLEIK

SEQ ID NO: 889 - protein, 6 aa, synthetic construct
  REGION 1..6: note = Description of Artificial Sequence: Synthetic peptide
ENIYSN

SEQ ID NO: 890 - skipped

SEQ ID NO: 891 - protein, 9 aa, synthetic construct
  REGION 1..9: note = Description of Artificial Sequence: Synthetic peptide
QHFWGTPYT

SEQ ID NO: 892 - protein, 120 aa, synthetic construct
  REGION 1..120: note = Description of Artificial Sequence: Synthetic polypeptide
DVQLQESGPGLVKPSQSLSLTCTVTGYSITSDYAWNWIRQFPGNKLEWMGYISYSGSTSYNPSLKSRISITRDTSKNQFFLQLNSVTTEDTATYYCARHYRYPPYAMDYWGQGTSVTVSS

SEQ ID NO: 893 - protein, 9 aa, synthetic construct
  REGION 1..9: note = Description of Artificial Sequence: Synthetic peptide
GYSITSDYA

SEQ ID NO: 894 - protein, 7 aa, synthetic construct
  REGION 1..7: note = Description of Artificial Sequence: Synthetic peptide
ISYSGST

SEQ ID NO: 895 - protein, 13 aa, synthetic construct
  REGION 1..13: note = Description of Artificial Sequence: Synthetic peptide
ARHYRYPPYAMDY

SEQ ID NO: 896 - protein, 113 aa, synthetic construct
  REGION 1..113: note = Description of Artificial Sequence: Synthetic polypeptide
DIVMTQSPSSLAMSVGQKVTMSCKSSQSLLNSSNQKNYLAWYQQKPGQSPKLLVYFASTRESGVPDRFIGSGSGTDFTLTITSVQAEDLADYFCQQHYSTPFTFGSGTKLEIK

SEQ ID NO: 897 - protein, 12 aa, synthetic construct
  REGION 1..12: note = Description of Artificial Sequence: Synthetic peptide
QSLLNSSNQKNY

SEQ ID NO: 898 - skipped

SEQ ID NO: 899 - protein, 9 aa, synthetic construct
  REGION 1..9: note = Description of Artificial Sequence: Synthetic peptide
QQHYSTPFT

SEQ ID NO: 900 - protein, 118 aa, synthetic construct
  REGION 1..118: note = Description of Artificial Sequence: Synthetic polypeptide
QVQLKQSGPGLVQPSQSLSITCTVSGFSLTSFGVHWVRQSPGKGLEWLGVIWSGGTTVYDAAFISRLSISKDNSKSQVFFKMNSLQTNDTAIYYCARKRGNFYVMDYWGQGTSVTVSS

SEQ ID NO: 901 - protein, 8 aa, synthetic construct
  REGION 1..8: note = Description of Artificial Sequence: Synthetic peptide
GFSLTSFG

SEQ ID NO: 902 - protein, 7 aa, synthetic construct
  REGION 1..7: note = Description of Artificial Sequence: Synthetic peptide
IWSGGTT

SEQ ID NO: 903 - protein, 12 aa, synthetic construct
  REGION 1..12: note = Description of Artificial Sequence: Synthetic peptide
ARKRGNFYVMDY

SEQ ID NO: 904 - protein, 113 aa, synthetic construct; identical to SEQ ID NO: 896
  REGION 1..113: note = Description of Artificial Sequence: Synthetic polypeptide

SEQ ID NO: 905 - protein, 12 aa, synthetic construct
  REGION 1..12: note = Description of Artificial Sequence: Synthetic peptide
QSLLNSSNQKNY

SEQ ID NO: 906 - skipped

SEQ ID NO: 907 - protein, 9 aa, synthetic construct
  REGION 1..9: note = Description of Artificial Sequence: Synthetic peptide
QQHYSTPFT

SEQ ID NO: 908 - protein, 118 aa, synthetic construct
  REGION 1..118: note = Description of Artificial Sequence: Synthetic polypeptide
QVQLQQPGSELVRPGTSVKLSCKASGYTFTSYWVHWVRQRHGQGLEWIGNVYPGSGSTNYDEKFKSKGTLTVDTSSSTAYMHLSSLTSEDSAVYYCTRGVLRFPLDYWGQGTTLTVSS

SEQ ID NO: 909 - protein, 8 aa, synthetic construct
  REGION 1..8: note = Description of Artificial Sequence: Synthetic peptide
GYTFTSYW

SEQ ID NO: 910 - protein, 8 aa, synthetic construct
  REGION 1..8: note = Description of Artificial Sequence: Synthetic peptide
VYPGSGST

SEQ ID NO: 911 - protein, 11 aa, synthetic construct
  REGION 1..11: note = Description of Artificial Sequence: Synthetic peptide
TRGVLRFPLDY

SEQ ID NO: 912 - protein, 112 aa, synthetic construct
  REGION 1..112: note = Description of Artificial Sequence: Synthetic polypeptide
DIVMTQAAPSVPVTPGESVSISCRSSKSLLHSNGNTYLYWFLQRPGQSPHLLIYRMSNLASGVPDRFSGSGSGTAFTLRISRVEAEDVGVYYCMQHLEYPLTFGAGTKLELK

SEQ ID NO: 913 - protein, 11 aa, synthetic construct
  REGION 1..11: note = Description of Artificial Sequence: Synthetic peptide
KSLLHSNGNTY

SEQ ID NO: 914 - skipped

SEQ ID NO: 915 - protein, 9 aa, synthetic construct
  REGION 1..9: note = Description of Artificial Sequence: Synthetic peptide
MQHLEYPLT

SEQ ID NO: 916 - protein, 118 aa, synthetic construct
  REGION 1..118: note = Description of Artificial Sequence: Synthetic polypeptide
QVQLQQSGPEVVRPGVSVKISCKGSGYKFPDYVMHWVKQSHAKSLEWIGIISIYSGNTNYNQKFKGKATMTVDKSSSTAYMELARLTSEDSAIYYCAREGDLPMFAYWGQGTLVTVSA

SEQ ID NO: 917 - protein, 8 aa, synthetic construct
  REGION 1..8: note = Description of Artificial Sequence: Synthetic peptide
GYKFPDYV

SEQ ID NO: 918 - protein, 8 aa, synthetic construct
  REGION 1..8: note = Description of Artificial Sequence: Synthetic peptide
ISIYSGNT

SEQ ID NO: 919 - protein, 11 aa, synthetic construct
  REGION 1..11: note = Description of Artificial Sequence: Synthetic peptide
AREGDLPMFAY

SEQ ID NO: 920 - protein, 106 aa, synthetic construct
  REGION 1..106: note = Description of Artificial Sequence: Synthetic polypeptide
QIVLTQSPAIMSASPGEKVTMTCNASSSVSYMYWYQQKPISSPRLLIYDTSNLASGVPVRFSGSGSGTSYSLTIGRMEAEDAATYYCQQWSSYPLTFGAGTKVEVK

SEQ ID NO: 921 - protein, 5 aa, synthetic construct
  REGION 1..5: note = Description of Artificial Sequence: Synthetic peptide
SSVSY

SEQ ID NO: 922 - skipped

SEQ ID NO: 923 - protein, 9 aa, synthetic construct
  REGION 1..9: note = Description of Artificial Sequence: Synthetic peptide
QQWSSYPLT

SEQ ID NO: 924 - protein, 122 aa, synthetic construct
  REGION 1..122: note = Description of Artificial Sequence: Synthetic polypeptide
QVQLKESGPGLVAPSQSLSITCTVSGFSLTAYNINWVRQPPGKGLEWLGMIWGDGNTDYNSPLKSRLTISKDNSKSQVFLKMDSLQTDDTARYYCARDLKVRRDSPYTMDYWGQGTSVTVSS

SEQ ID NO: 925 - protein, 8 aa, synthetic construct
  REGION 1..8: note = Description of Artificial Sequence: Synthetic peptide
GFSLTAYN

SEQ ID NO: 926 - protein, 7 aa, synthetic construct
  REGION 1..7: note = Description of Artificial Sequence: Synthetic peptide
IWGDGNT

SEQ ID NO: 927 - protein, 16 aa, synthetic construct
  REGION 1..16: note = Description of Artificial Sequence: Synthetic peptide
ARDLKVRRDSPYTMDY

SEQ ID NO: 928 - protein, 112 aa, synthetic construct
  REGION 1..112: note = Description of Artificial Sequence: Synthetic polypeptide
NIMMTQSPSSLAVSAGEKVTMSCKSSQSVLYSSNQKNYLAWYQQKPGQSPKLLIYWASNRESGVPDRFTGSGSGTDFTLTISSVQAEDLAVYYCHQYLSSYTFGGGTKLEIK

SEQ ID NO: 929 - protein, 12 aa, synthetic construct
  REGION 1..12: note = Description of Artificial Sequence: Synthetic peptide
QSVLYSSNQKNY

SEQ ID NO: 930 - skipped

SEQ ID NO: 931 - protein, 8 aa, synthetic construct
  REGION 1..8: note = Description of Artificial Sequence: Synthetic peptide
HQYLSSYT

SEQ ID NO: 932 - protein, 124 aa, synthetic construct
  REGION 1..124: note = Description of Artificial Sequence: Synthetic polypeptide
DVQLQESGPGLVKPSQSLSLTCTVTGYSLTSDYAWNWIRQFPGNKLEWMGYITYSGGTTYNPSLKSRISITRDTSKNQFFLQLTSVTTEDTATYYCARRGSGTTVVGDWYFDVWGAGTTVTVSS

SEQ ID NO: 933 - protein, 9 aa, synthetic construct
  REGION 1..9: note = Description of Artificial Sequence: Synthetic peptide
GYSLTSDYA

SEQ ID NO: 934 - protein, 7 aa, synthetic construct
  REGION 1..7: note = Description of Artificial Sequence: Synthetic peptide
ITYSGGT

SEQ ID NO: 935 - protein, 17 aa, synthetic construct
  REGION 1..17: note = Description of Artificial Sequence: Synthetic peptide
ARRGSGTTVVGDWYFDV

SEQ ID NO: 936 - protein, 113 aa, synthetic construct
  REGION 1..113: note = Description of Artificial Sequence: Synthetic polypeptide
DIVMSQSPSSLAVSVGEKVTMSCKSSQSLLYSFNQKYYLAWYQQKPGQSPKLLIYWASTRESGVPDRFTGSGSGTDFTPTISSVTAEDLAVYYCQQFYTYPYTFGGGTKLEMK

SEQ ID NO: 937 - protein, 12 aa, synthetic construct
  REGION 1..12: note = Description of Artificial Sequence: Synthetic peptide
QSLLYSFNQKYY

SEQ ID NO: 938 - skipped

SEQ ID NO: 939 - protein, 9 aa, synthetic construct
  REGION 1..9: note = Description of Artificial Sequence: Synthetic peptide
QQFYTYPYT

SEQ ID NO: 940 - protein, 122 aa, synthetic construct
  REGION 1..122: note = Description of Artificial Sequence: Synthetic polypeptide
EVQVQQSGPELVKPGASVKISCKASGYTFTKSNMHWVKQSHGKSLEWIGYIYPYNGGTGYNQNFKSKATLTVDISSSTAYMELRSLTLEDSAVYLCAREADYYGNRGQFDYWGQGTLVTVSA

SEQ ID NO: 941 - protein, 8 aa, synthetic construct
  REGION 1..8: note = Description of Artificial Sequence: Synthetic peptide
GYTFTKSN

SEQ ID NO: 942 - protein, 8 aa, synthetic construct
  REGION 1..8: note = Description of Artificial Sequence: Synthetic peptide
IYPYNGGT

SEQ ID NO: 943 - protein, 15 aa, synthetic construct
  REGION 1..15: note = Description of Artificial Sequence: Synthetic peptide
AREADYYGNRGQFDY

SEQ ID NO: 944 - protein, 107 aa, synthetic construct
  REGION 1..107: note = Description of Artificial Sequence: Synthetic polypeptide
DIQMTQSPASLSVSVGETVTITCRASDNIFSNLAWYHQKQGKSPHLLVYGATNLADGVPSRFSGSGSGTQYSLKINSLQSEDFGDYYCQHFWGTPYTFGGGTKLEIK

SEQ ID NO: 945 - protein, 6 aa, synthetic construct
  REGION 1..6: note = Description of Artificial Sequence: Synthetic peptide
DNIFSN

SEQ ID NO: 946 - skipped

SEQ ID NO: 947 - protein, 9 aa, synthetic construct
  REGION 1..9: note = Description of Artificial Sequence: Synthetic peptide
QHFWGTPYT

SEQ ID NO: 948 - protein, 119 aa, synthetic construct
  REGION 1..119: note = Description of Artificial Sequence: Synthetic polypeptide
QVQLQQSGAELMRPGTSVKVSCKASGYAFTNHLIEWIKQRPGQGLEWIGVINPGSDSTDYNEKFKDKATLTADKSSSTAYMQLSSLTSDDSAVYFCARSLYYNSWFVYWGQGTLVTVSA

SEQ ID NO: 949 - protein, 8 aa, synthetic construct
  REGION 1..8: note = Description of Artificial Sequence: Synthetic peptide
GYAFTNHL

SEQ ID NO: 950 - protein, 8 aa, synthetic construct
  REGION 1..8: note = Description of Artificial Sequence: Synthetic peptide
INPGSDST

SEQ ID NO: 951 - protein, 12 aa, synthetic construct
  REGION 1..12: note = Description of Artificial Sequence: Synthetic peptide
ARSLYYNSWFVY

SEQ ID NO: 952 - protein, 107 aa, synthetic construct
  REGION 1..107: note = Description of Artificial Sequence: Synthetic polypeptide
DIQMTQSPASLSASVGETVTITCRASENIYSYLAWYQQKRGKSPQLLVYNAKTLVEGVPSRFSGSGSGTQFSLKINSLQPEDFGSYYCQHHYGTPYTFGGGTKLEIK

SEQ ID NO: 953 - protein, 6 aa, synthetic construct
  REGION 1..6: note = Description of Artificial Sequence: Synthetic peptide
ENIYSY

SEQ ID NO: 954 - skipped

SEQ ID NO: 955 - protein, 9 aa, synthetic construct
  REGION 1..9: note = Description of Artificial Sequence: Synthetic peptide
QHHYGTPYT

SEQ ID NO: 956 - protein, 118 aa, synthetic construct
  REGION 1..118: note = Description of Artificial Sequence: Synthetic polypeptide
EVQLQQSGAELVKPGASVRLSCTASGFSIRDTYIHWVKQRPEQGLDWIGKIDPANGKSEYDPKFQGRATMTTDTSSNTAYLQLSSLTSEDTAVYYCTRYGYYPYFDVWGAGTTVTVFS

SEQ ID NO: 957 - protein, 8 aa, synthetic construct
  REGION 1..8: note = Description of Artificial Sequence: Synthetic peptide
GFSIRDTY

SEQ ID NO: 958 - protein, 8 aa, synthetic construct
  REGION 1..8: note = Description of Artificial Sequence: Synthetic peptide
IDPANGKS

SEQ ID NO: 959 - protein, 11 aa, synthetic construct
  REGION 1..11: note = Description of Artificial Sequence: Synthetic peptide
TRYGYYPYFDV

SEQ ID NO: 960 - protein, 107 aa, synthetic construct
  REGION 1..107: note = Description of Artificial Sequence: Synthetic polypeptide
SIVMTQTPKFLLVSAGDRVAITCKASQSVRHDVVWYQQKPGQSPKLLIYYASSRYTGVPDRFTGSGYGTDFTFTISTVQAEDLALYFCLQDFSSPWTFGGGTKLEIK

SEQ ID NO: 961 - protein, 6 aa, synthetic construct
  REGION 1..6: note = Description of Artificial Sequence: Synthetic peptide
QSVRHD

SEQ ID NO: 962 - skipped

SEQ ID NO: 963 - protein, 9 aa, synthetic construct
  REGION 1..9: note = Description of Artificial Sequence: Synthetic peptide
LQDFSSPWT

SEQ ID NO: 964 - protein, 120 aa, synthetic construct
  REGION 1..120: note = Description of Artificial Sequence: Synthetic polypeptide
EVQLQQSGPELVKPGASVKISCKTSGYTFTKNTMHWVRQSHGKSLEWIGGINPNSGGASFNQKFMGKATLTVDKSSSTAYMELRSLTSEDSAVYYCARDGYDGDWFFDVWGAGTTVTVSS

SEQ ID NO: 965 - protein, 8 aa, synthetic construct
  REGION 1..8: note = Description of Artificial Sequence: Synthetic peptide
GYTFTKNT

SEQ ID NO: 966 - protein, 8 aa, synthetic construct
  REGION 1..8: note = Description of Artificial Sequence: Synthetic peptide
INPNSGGA

SEQ ID NO: 967 - protein, 13 aa, synthetic construct
  REGION 1..13: note = Description of Artificial Sequence: Synthetic peptide
ARDGYDGDWFFDV

SEQ ID NO: 968 - protein, 107 aa, synthetic construct
  REGION 1..107: note = Description of Artificial Sequence: Synthetic polypeptide
DIQMNQSPFSLSASLGDTVTITCHASQNIYVWLSWYQQKPGNIPKLLIYKASDLHTGVPSRFSGSGSGTDFTLNISSLQPEDIATYYCQQGQSYPRTFGGGTKLEIK

SEQ ID NO: 969 - protein, 6 aa, synthetic construct
  REGION 1..6: note = Description of Artificial Sequence: Synthetic peptide
QNIYVW

SEQ ID NO: 970 - skipped

SEQ ID NO: 971 - protein, 9 aa, synthetic construct
  REGION 1..9: note = Description of Artificial Sequence: Synthetic peptide
QQGQSYPRT

SEQ ID NO: 972 - protein, 114 aa, synthetic construct
  REGION 1..114: note = Description of Artificial Sequence: Synthetic polypeptide
QVQLKESGPGLVAPSQSLSITCTVSGFSLIGHGVNWIRQPPGKGLEWLGVIWGDGNTDYNSALKSRLSISKDNSKSQVFLKMNSLQTDDTARYFCAVNSAMDYWGQGTAVTVSS

SEQ ID NO: 973 - protein, 8 aa, synthetic construct
  REGION 1..8: note = Description of Artificial Sequence: Synthetic peptide
GFSLIGHG

SEQ ID NO: 974 - protein, 7 aa, synthetic construct
  REGION 1..7: note = Description of Artificial Sequence: Synthetic peptide
IWGDGNT

SEQ ID NO: 975 - protein, 8 aa, synthetic construct
  REGION 1..8: note = Description of Artificial Sequence: Synthetic peptide
AVNSAMDY

SEQ ID NO: 976 - protein, 107 aa, synthetic construct
  REGION 1..107: note = Description of Artificial Sequence: Synthetic polypeptide
NIVMTQSPKSMSMSVGERVTLNCTASENVASFVSWYQQKPEQSPKLLIYGTSNRYTGVPDRFTGSGSATDFTLTISSVQAEDLGDYHCGQSYNYPFTFGSGTKLEIE

SEQ ID NO: 977 - protein, 6 aa, synthetic construct
  REGION 1..6: note = Description of Artificial Sequence: Synthetic peptide
ENVASF

SEQ ID NO: 978 - skipped

SEQ ID NO: 979 - protein, 9 aa, synthetic construct
  REGION 1..9: note = Description of Artificial Sequence: Synthetic peptide
GQSYNYPFT

SEQ ID NO: 980 - protein, 119 aa, synthetic construct
  REGION 1..119: note = Description of Artificial Sequence: Synthetic polypeptide
QVQLQQSGAELVRPGASVKVSCKTSGYAFTNYLIEWVKQRPGQGLEWIGVINPGSGGIYYNDKFKVKTTLTADKSSSTAYMQLSSLTSDDSAVYFCARSETHDTWFAYWGQGTLVTVSA

SEQ ID NO: 981 - protein, 8 aa, synthetic construct
  REGION 1..8: note = Description of Artificial Sequence: Synthetic peptide
GYAFTNYL

SEQ ID NO: 982 - protein, 8 aa, synthetic construct
  REGION 1..8: note = Description of Artificial Sequence: Synthetic peptide
INPGSGGI

SEQ ID NO: 983 - protein, 12 aa, synthetic construct
  REGION 1..12: note = Description of Artificial Sequence: Synthetic peptide
ARSETHDTWFAY

SEQ ID NO: 984 - protein, 108 aa, synthetic construct
  REGION 1..108: note = Description of Artificial Sequence: Synthetic polypeptide
DIVMTQSQKFISTSVGDRVSITCKASQSVRIAVAWFQQKPGQSPKALIYLASTRHTGVPDRFTGSGSGTDFTLTISNVQSEDLADYFCLQHWNYPYTFGGGTKLEIKR

SEQ ID NO: 985 - protein, 6 aa, synthetic construct
  REGION 1..6: note = Description of Artificial Sequence: Synthetic peptide
QSVRIA

SEQ ID NO: 986 - skipped

SEQ ID NO: 987 - protein, 9 aa, synthetic construct
  REGION 1..9: note = Description of Artificial Sequence: Synthetic peptide
LQHWNYPYT

SEQ ID NO: 988 - protein, 120 aa, synthetic construct
  REGION 1..120: note = Description of Artificial Sequence: Synthetic polypeptide
QVQLQQSGAELVRPGTSVKMSCKAAGYTFTNYWIGWVKQRPGHGLEWIGDIYPGGGYTNYNEKFKGKATLTADTSSSTAYMQLSSLTSEDSAIYYCASPYYGSSYGFAFWGQGTLVTVSA

SEQ ID NO: 989 - protein, 8 aa, synthetic construct
  REGION 1..8: note = Description of Artificial Sequence: Synthetic peptide
GYTFTNYW

SEQ ID NO: 990 - protein, 8 aa, synthetic construct
  REGION 1..8: note = Description of Artificial Sequence: Synthetic peptide
IYPGGGYT

SEQ ID NO: 991 - protein, 13 aa, synthetic construct
  REGION 1..13: note = Description of Artificial Sequence: Synthetic peptide
ASPYYGSSYGFAF

SEQ ID NO: 992 - protein, 108 aa, synthetic construct; identical to SEQ ID NO: 984
  REGION 1..108: note = Description of Artificial Sequence: Synthetic polypeptide

SEQ ID NO: 993 - protein, 6 aa, synthetic construct
  REGION 1..6: note = Description of Artificial Sequence: Synthetic peptide
QSVRIA

SEQ ID NO: 994 - skipped

SEQ ID NO: 995 - protein, 9 aa, synthetic construct
  REGION 1..9: note = Description of Artificial Sequence: Synthetic peptide
LQHWNYPYT

SEQ ID NO: 996 - protein, 117 aa, synthetic construct
  REGION 1..117: note = Description of Artificial Sequence: Synthetic polypeptide
QVQLKESGPGLVAPSQSLSITCTVSGFSLSGYGIKWVRQPPGKGLEWLGTIWGDGSTDYNSALKSRLSISKDNSKSQVFLKMTSLQTDDTARYYCASDSLGITFGYWGQGTLVTVSA

SEQ ID NO: 997 - protein, 8 aa, synthetic construct
  REGION 1..8: note = Description of Artificial Sequence: Synthetic peptide
GFSLSGYG

SEQ ID NO: 998 - protein, 7 aa, synthetic construct
  REGION 1..7: note = Description of Artificial Sequence: Synthetic peptide
IWGDGST

SEQ ID NO: 999 - protein, 11 aa, synthetic construct
  REGION 1..11: note = Description of Artificial Sequence: Synthetic peptide
ASDSLGITFGY

SEQ ID NO: 1000 - protein, 107 aa, synthetic construct
  REGION 1..107: note = Description of Artificial Sequence: Synthetic polypeptide
DIQMTQTTSSLSASLGDRVTISCRASQDISNYLNWYQQKPDGTVKLLIYYTSRLHSGVPSRFSGSGSGTDYSLTISNLEQEDIATYFCQQGNTLPLTFGAGTKLELK

SEQ ID NO: 1001 - protein, 6 aa, synthetic construct
  REGION 1..6: note = Description of Artificial Sequence: Synthetic peptide
QDISNY

SEQ ID NO: 1002 - skipped

SEQ ID NO: 1003 - protein, 9 aa, synthetic construct
  REGION 1..9: note = Description of Artificial Sequence: Synthetic peptide
QQGNTLPLT

SEQ ID NO: 1004 - protein, 120 aa, synthetic construct
  REGION 1..120: note = Description of Artificial Sequence: Synthetic polypeptide
QVQLKESGPGLVAPSQSLSITCTVSGFSLTSYAITWVRQPPGKGLEWLGVIWPGGGTNYNSALKSRLSISKDNSKSHLFLKMNSLQTDDTARYYCVRSYDGYLDWYFDVWGTGTTVTVSS

SEQ ID NO: 1005 - protein, 8 aa, synthetic construct
  REGION 1..8: note = Description of Artificial Sequence: Synthetic peptide
GFSLTSYA

SEQ ID NO: 1006 - protein, 7 aa, synthetic construct
  REGION 1..7: note = Description of Artificial Sequence: Synthetic peptide
IWPGGGT

SEQ ID NO: 1007 - protein, 14 aa, synthetic construct
  REGION 1..14: note = Description of Artificial Sequence: Synthetic peptide
VRSYDGYLDWYFDV

SEQ ID NO: 1008 - protein, 107 aa, synthetic construct
  REGION 1..107: note = Description of Artificial Sequence: Synthetic polypeptide
NIVMTQSPKSMSMSVGERVTLSCKASENVGTYVSWYQQKPDQSPKLLIYGASNRYTGVPDRFTGSGSATDFTLIISSVQAEDLSDYHCGQSYSYPYTFGGGTKLEII

SEQ ID NO: 1009 - protein, 6 aa, synthetic construct
  REGION 1..6: note = Description of Artificial Sequence: Synthetic peptide
ENVGTY

SEQ ID NO: 1010 - skipped

SEQ ID NO: 1011 - protein, 9 aa, synthetic construct
  REGION 1..9: note = Description of Artificial Sequence: Synthetic peptide
GQSYSYPYT

SEQ ID NO: 1012 - protein, 123 aa, synthetic construct
  REGION 1..123: note = Description of Artificial Sequence: Synthetic polypeptide
QIQLVQSGPDLKKPGETVKISCKASGYTFTTYGMSWVKQAPGRGLKWMGWINTYSGVSTFPDDFKGRFAFSLETSASTAYLQINNLKNEDSATYFCARLGMGSTTGAGYFDVWGTGTTVTVSS

SEQ ID NO: 1013 - protein, 8 aa, synthetic construct
  REGION 1..8: note = Description of Artificial Sequence: Synthetic peptide
GYTFTTYG

SEQ ID NO: 1014 - protein, 8 aa, synthetic construct
  REGION 1..8: note = Description of Artificial Sequence: Synthetic peptide
INTYSGVS

SEQ ID NO: 1015 - protein, 16 aa, synthetic construct
  REGION 1..16: note = Description of Artificial Sequence: Synthetic peptide
ARLGMGSTTGAGYFDV

SEQ ID NO: 1016 - protein, 108 aa, synthetic construct
  REGION 1..108: note = Description of Artificial Sequence: Synthetic polypeptide
DIVLTQSPAIMSASPGEKVTMTCSASSSVSSWYLHWYQQKSGASPKLWIYGTSNLASGVPARFSGSGSGTSYSLTISSVEAEDAATYYCQQYRSDPYTFGSGTKLEIK

SEQ ID NO: 1017 - protein, 7 aa, synthetic construct
  REGION 1..7: note = Description of Artificial Sequence: Synthetic peptide
SSVSSWY

SEQ ID NO: 1018 - skipped

SEQ ID NO: 1019 - protein, 9 aa, synthetic construct
  REGION 1..9: note = Description of Artificial Sequence: Synthetic peptide
QQYRSDPYT

SEQ ID NO: 1020 - protein, 123 aa, synthetic construct
  REGION 1..123: note = Description of Artificial Sequence: Synthetic polypeptide
QIQLVQSGPELKKPGETVKISCKASGYTFTTYGMSWVKQAPGKGLKWMGWINTYSGVSTYADDFEGRFAFSLETSVSTAYLQINNLKNEDTATYFCARLGRGSTTGAGYLDVWGTGTTVTVSS

SEQ ID NO: 1021 - protein, 8 aa, synthetic construct
  REGION 1..8: note = Description of Artificial Sequence: Synthetic peptide
GYTFTTYG

SEQ ID NO: 1022 - protein, 8 aa, synthetic construct
  REGION 1..8: note = Description of Artificial Sequence: Synthetic peptide
INTYSGVS

SEQ ID NO: 1023 - protein, 16 aa, synthetic construct
  REGION 1..16: note = Description of Artificial Sequence: Synthetic peptide
ARLGRGSTTGAGYLDV

SEQ ID NO: 1024 - protein, 108 aa, synthetic construct
  REGION 1..108: note = Description of Artificial Sequence: Synthetic polypeptide
DIVLTQSPAIMSASPGEKVSMTCSASSSVSSWYLHWYQQKSGASPKLWIYGTSNLASGVPARFSGSGSGTSYSLTISSVEAEDAATYYCQQYHSDPYTFGSGTKLEIK

SEQ ID NO: 1025 - protein, 7 aa, synthetic construct
  REGION 1..7: note = Description of Artificial Sequence: Synthetic peptide
SSVSSWY

SEQ ID NO: 1026 - skipped

SEQ ID NO: 1027 - protein, 9 aa, synthetic construct
  REGION 1..9: note = Description of Artificial Sequence: Synthetic peptide
QQYHSDPYT

SEQ ID NO: 1028 - protein, 123 aa, synthetic construct; identical to SEQ ID NO: 1012
  REGION 1..123: note = Description of Artificial Sequence: Synthetic polypeptide

SEQ ID NO: 1029 - protein, 8 aa, synthetic construct
  REGION 1..8: note = Description of Artificial Sequence: Synthetic peptide
GYTFTTYG

SEQ ID NO: 1030 - protein, 8 aa, synthetic construct
  REGION 1..8: note = Description of Artificial Sequence: Synthetic peptide
INTYSGVS

SEQ ID NO: 1031 - protein, 16 aa, synthetic construct
  REGION 1..16: note = Description of Artificial Sequence: Synthetic peptide
ARLGMGSTTGAGYFDV

SEQ ID NO: 1032 - protein, 106 aa, synthetic construct
  REGION 1..106: note = Description of Artificial Sequence: Synthetic polypeptide
ENVLTQSPAIMSASLGEKVTLSCRASSSVNYMYWYQQKSDASPKLWIYYTSNLAPGVPARFSGSGSGNSYSLTISSVEGEDAATYYCQQFTSSPWTFGGGTKLEIK

SEQ ID NO: 1033 - protein, 5 aa, synthetic construct
  REGION 1..5: note = Description of Artificial Sequence: Synthetic peptide
SSVNY

SEQ ID NO: 1034 - skipped

SEQ ID NO: 1035 - protein, 9 aa, synthetic construct
  REGION 1..9: note = Description of Artificial Sequence: Synthetic peptide
QQFTSSPWT

SEQ ID NO: 1036 - protein, 114 aa, synthetic construct
  REGION 1..114: note = Description of Artificial Sequence: Synthetic polypeptide
EVQLQQSGPELVKPGASVKISCKASGYTFTDYSMNWVKQSHGKSLEWIGDITPNNGSPNYNQKFKDKATLTVDKSSSTVYMELRSLTSEDSAVYYCASLFFDYWGHGTTLTVSS

SEQ ID NO: 1037 - protein, 8 aa, synthetic construct
  REGION 1..8: note = Description of Artificial Sequence: Synthetic peptide
GYTFTDYS

SEQ ID NO: 1038 - protein, 8 aa, synthetic construct
  REGION 1..8: note = Description of Artificial Sequence: Synthetic peptide
ITPNNGSP

SEQ ID NO: 1039 - protein, 7 aa, synthetic construct
  REGION 1..7: note = Description of Artificial Sequence: Synthetic peptide
ASLFFDY

SEQ ID NO: 1040 - protein, 113 aa, synthetic construct
  REGION 1..113: note = Description of Artificial Sequence: Synthetic polypeptide
DIVMTQSPSSLSVSAGEKVTMSCKSSQSLLNSGNQKNYLAWYQQKPGQPPKLLIYGASTRDSGVPDRFTGSGSGTDFTLTITSVQAEDLAVYYCQNDHTYPYTFGGGTKLEIK

SEQ ID NO: 1041 - protein, 12 aa, synthetic construct
  REGION 1..12: note = Description of Artificial Sequence: Synthetic peptide
QSLLNSGNQKNY

SEQ ID NO: 1042 - skipped

SEQ ID NO: 1043 - protein, 9 aa, synthetic construct
  REGION 1..9: note = Description of Artificial Sequence: Synthetic peptide
QNDHTYPYT

SEQ ID NO: 1044 - protein, 120 aa, synthetic construct
  REGION 1..120: note = Description of Artificial Sequence: Synthetic polypeptide
QVQLQQPGTELVKPGASVKLSCKASGFTFTTHWMHWVRQRPGQGLEWIGNIYPSNGGSNYNEKFKTKATLTVDRSSSTAYMHLSSLTSEDSAVYYCARRVNWDGYYFDYWGQGTTLTVSS

SEQ ID NO: 1045 - protein, 8 aa, synthetic construct
  REGION 1..8: note = Description of Artificial Sequence: Synthetic peptide
GFTFTTHW

SEQ ID NO: 1046 - protein, 8 aa, synthetic construct
  REGION 1..8: note = Description of Artificial Sequence: Synthetic peptide
IYPSNGGS

SEQ ID NO: 1047 - protein, 13 aa, synthetic construct
  REGION 1..13: note = Description of Artificial Sequence: Synthetic peptide
ARRVNWDGYYFDY

SEQ ID NO: 1048 - protein, 107 aa, synthetic construct
  REGION 1..107: note = Description of Artificial Sequence: Synthetic polypeptide
DIVMTQSQKFMSTSVGDRVSVTCKASQNVGTNVAWYQQKPGQSPKLLIYSASYRYSGVPDRFTGSGSGTDFTLTISNVQSEDLADYFCQQYNSYPLTFGGGTKLEIK

SEQ ID NO: 1049 - protein, 6 aa, synthetic construct
  REGION 1..6: note = Description of Artificial Sequence: Synthetic peptide
QNVGTN

SEQ ID NO: 1050 - skipped

SEQ ID NO: 1051 - protein, 9 aa, synthetic construct
  REGION 1..9: note = Description of Artificial Sequence: Synthetic peptide
QQYNSYPLT

SEQ ID NO: 1052 - protein, 118 aa, synthetic construct
  REGION 1..118: note = Description of Artificial Sequence: Synthetic polypeptide
QVQLQESGTELVKPGASVKLSCKASGYTFTSYWIHWVKQRPGQGLEWIGNINPSNGGTNYNEKFKSKAALTVDKSSSTAYMQLSSLTSEDSAVYYCARRGLPYFFDYWGQGTTLTVSS

SEQ ID NO: 1053 - protein, 8 aa, synthetic construct
  REGION 1..8: note = Description of Artificial Sequence: Synthetic peptide
GYTFTSYW

SEQ ID NO: 1054 - protein, 8 aa, synthetic construct
  REGION 1..8: note = Description of Artificial Sequence: Synthetic peptide
INPSNGGT

SEQ ID NO: 1055 - protein, 11 aa, synthetic construct
  REGION 1..11: note = Description of Artificial Sequence: Synthetic peptide
ARRGLPYFFDY

SEQ ID NO: 1056 - protein, 107 aa, synthetic construct
  REGION 1..107: note = Description of Artificial Sequence: Synthetic polypeptide
DIVMTQSQKFMSTSVGDRVSVTCKGSQNVGYNVAWYQQKPGQSPKALVYSASDRHSGVPDRFAGSGSGTDFTLTISNVQSEDLAEYFCQQYNSYPLTFGAGTKLELK

SEQ ID NO: 1057 - protein, 6 aa, synthetic construct
  REGION 1..6: note = Description of Artificial Sequence: Synthetic peptide
QNVGYN

SEQ ID NO: 1058 - skipped

SEQ ID NO: 1059 - protein, 9 aa, synthetic construct
  REGION 1..9: note = Description of Artificial Sequence: Synthetic peptide
QQYNSYPLT

SEQ ID NO: 1060 - protein, 8 aa, synthetic construct
  REGION 1..8: note = Description of Artificial Sequence: Synthetic peptide
GGTFSSYA

SEQ ID NO: 1061 - protein, 8 aa, synthetic construct
  REGION 1..8: note = Description of Artificial Sequence: Synthetic peptide
IIPIFGTA

SEQ ID NO: 1062 - protein, 13 aa, synthetic construct
  REGION 1..13: note = Description of Artificial Sequence: Synthetic peptide
AREEVSSPYGMDV

SEQ ID NO: 1063 - protein, 9 aa, synthetic construct
  REGION 1..9: note = Description of Artificial Sequence: Synthetic peptide
TGAVTSGHY

SEQ ID NO: 1064 - skipped

SEQ ID NO: 1065 - protein, 10 aa, synthetic construct
  REGION 1..10: note = Description of Artificial Sequence: Synthetic peptide
LLSYSGASWV

SEQ ID NO: 1066 - protein, 8 aa, synthetic construct
  REGION 1..8: note = Description of Artificial Sequence: Synthetic peptide
GGTFSSSA

SEQ ID NO: 1067 - protein, 8 aa, synthetic construct
  REGION 1..8: note = Description of Artificial Sequence: Synthetic peptide
IIPIYGIT

SEQ ID NO: 1068 - protein, 22 aa, synthetic construct
  REGION 1..22: note = Description of Artificial Sequence: Synthetic peptide
ARDDTARRVRGVPYYYYYAMDV

SEQ ID NO: 1069 - protein, 6 aa, synthetic construct
  REGION 1..6: note = Description of Artificial Sequence: Synthetic peptide
QGIGNY

SEQ ID NO: 1070 - skipped

SEQ ID NO: 1071 - protein, 9 aa, synthetic construct
  REGION 1..9: note = Description of Artificial Sequence: Synthetic peptide
QQLKDYPIT

SEQ ID NO: 1072 - protein, 8 aa, synthetic construct
  REGION 1..8: note = Description of Artificial Sequence: Synthetic peptide
GFSLSHFS

SEQ ID NO: 1073 - protein, 8 aa, synthetic construct
  REGION 1..8: note = Description of Artificial Sequence: Synthetic peptide
FDPEEGGT

SEQ ID NO: 1074 - protein, 14 aa, synthetic construct
  REGION 1..14: note = Description of Artificial Sequence: Synthetic peptide
ATGIWYSSGWPVDY

SEQ ID NO: 1075 - protein, 11 aa, synthetic construct
  REGION 1..11: note = Description of Artificial Sequence: Synthetic peptide
QSLLDSSGYNY

SEQ ID NO: 1076 - skipped

SEQ ID NO: 1077 - protein, 9 aa, synthetic construct
  REGION 1..9: note = Description of Artificial Sequence: Synthetic peptide
MQALQTPIT

SEQ ID NO: 1078 - protein, 8 aa, synthetic construct
  REGION 1..8: note = Description of Artificial Sequence: Synthetic peptide
GYTLTELS

SEQ ID NO: 1079 - protein, 8 aa, synthetic construct
  REGION 1..8: note = Description of Artificial Sequence: Synthetic peptide
FDPEDGET

SEQ ID NO: 1080 - protein, 18 aa, synthetic construct
  REGION 1..18: note = Description of Artificial Sequence: Synthetic peptide
ATVSRVRGVINYYYYMDV

SEQ ID NO: 1081 - protein, 11 aa, synthetic construct
  REGION 1..11: note = Description of Artificial Sequence: Synthetic peptide
QSLLYRNGNNY

SEQ ID NO: 1082 - skipped

SEQ ID NO: 1083 - protein, 9 aa, synthetic construct
  REGION 1..9: note = Description of Artificial Sequence: Synthetic peptide
MQALQTPPT

SEQ ID NO: 1084 - protein, 8 aa, synthetic construct
  REGION 1..8: note = Description of Artificial Sequence: Synthetic peptide
GGTFSSSA

SEQ ID NO: 1085 - protein, 8 aa, synthetic construct
  REGION 1..8: note = Description of Artificial Sequence: Synthetic peptide
IIPIYGIT

SEQ ID NO: 1086 - protein, 22 aa, synthetic construct
  REGION 1..22: note = Description of Artificial Sequence: Synthetic peptide
ARDDTARRVRGVPYYYYYAMDV

SEQ ID NO: 1087 - protein, 6 aa, synthetic construct
  REGION 1..6: note = Description of Artificial Sequence: Synthetic peptide
QSVDSS

SEQ ID NO: 1088 - skipped

SEQ ID NO: 1089 - protein, 9 aa, synthetic construct
  REGION 1..9: note = Description of Artificial Sequence: Synthetic peptide
QQYKDWPFT

SEQ ID NO: 1090 - protein, 8 aa, synthetic construct
  REGION 1..8: note = Description of Artificial Sequence: Synthetic peptide
GGTFGTYA

SEQ ID NO: 1091 - protein, 8 aa, synthetic construct
  REGION 1..8: note = Description of Artificial Sequence: Synthetic peptide
ITPISATI

SEQ ID NO: 1092 - protein, 13 aa, synthetic construct
  REGION 1..13: note = Description of Artificial Sequence: Synthetic peptide
ARGFEYSDGLLDD

SEQ ID NO: 1093 - protein, 12 aa, synthetic construct
  REGION 1..12: note = Description of Artificial Sequence: Synthetic peptide
QSLFYSDDGNTY

SEQ ID NO: 1094 - skipped

SEQ ID NO: 1095 - protein, 9 aa, synthetic construct
  REGION 1..9: note = Description of Artificial Sequence: Synthetic peptide
MQHMEFPLT

SEQ ID NO: 1096 - protein, 10 aa, synthetic construct
  REGION 1..10: note = Description of Artificial Sequence: Synthetic peptide
GGSISSSSYY

SEQ ID NO: 1097 - protein, 7 aa, synthetic construct
  REGION 1..7: note = Description of Artificial Sequence: Synthetic peptide
IYYSGST

SEQ ID NO: 1098 - protein, 15 aa, synthetic construct
  REGION 1..15: note = Description of Artificial Sequence: Synthetic peptide
ARGAWELRLGDWFDP

SEQ ID NO: 1099 - protein, 9 aa, synthetic construct
  REGION 1..9: note = Description of Artificial Sequence: Synthetic peptide
SSNIGAGYD

SEQ ID NO: 1100 - skipped

SEQ ID NO: 1101 - protein, 12 aa, synthetic construct
  REGION 1..12: note = Description of Artificial Sequence: Synthetic peptide
QSYDSSLSIYVV

SEQ ID NO: 1102 - protein, 9 aa, synthetic construct
  REGION 1..9: note = Description of Artificial Sequence: Synthetic peptide
SGSISSTNW

SEQ ID NO: 1103 - protein, 7 aa, synthetic construct
  REGION 1..7: note = Description of Artificial Sequence: Synthetic peptide
IYHSGST

SEQ ID NO: 1104 - protein, 10 aa, synthetic construct
  REGION 1..10: note = Description of Artificial Sequence: Synthetic peptide
ARVGPAAIYY

SEQ ID NO: 1105 - protein, 8 aa, synthetic construct
  REGION 1..8: note = Description of Artificial Sequence: Synthetic peptide
SNNVGYEG

SEQ ID NO: 1106 - skipped

SEQ ID NO: 1107 - protein, 11 aa, synthetic construct
  REGION 1..11: note = Description of Artificial Sequence: Synthetic peptide
SAWDSSLNAVV

SEQ ID NO: 1108 - protein, 8 aa, synthetic construct
  REGION 1..8: note = Description of Artificial Sequence: Synthetic peptide
GYTLTELS

SEQ ID NO: 1109 - protein, 8 aa, synthetic construct
  REGION 1..8: note = Description of Artificial Sequence: Synthetic peptide
FDPEDGET

SEQ ID NO: 1110 - protein, 21 aa, synthetic construct
  REGION 1..21: note = Description of Artificial Sequence: Synthetic peptide
ATAKPGIAVAGQNYYYYYMDV

SEQ ID NO: 1111 - protein, 11 aa, synthetic construct
  REGION 1..11: note = Description of Artificial Sequence: Synthetic peptide
QSLLYRNGNNY

SEQ ID NO: 1112 - skipped

SEQ ID NO: 1113 - protein, 9 aa, synthetic construct
  REGION 1..9: note = Description of Artificial Sequence: Synthetic peptide
MQALQTPPT

SEQ ID NO: 1114 - protein, 8 aa, synthetic construct
  REGION 1..8: note = Description of Artificial Sequence: Synthetic peptide
GFTFSSYA

SEQ ID NO: 1115 - protein, 8 aa, synthetic construct
  REGION 1..8: note = Description of Artificial Sequence: Synthetic peptide
ISYDGSNK

SEQ ID NO: 1116 - protein, 17 aa, synthetic construct
  REGION 1..17: note = Description of Artificial Sequence: Synthetic peptide
ASSPIGYSYGYWGGMDV

SEQ ID NO: 1117 - protein, 9 aa, synthetic construct
  REGION 1..9: note = Description of Artificial Sequence: Synthetic peptide
SGIDVRTNK

SEQ ID NO: 1118 - protein, 7 aa, synthetic construct
  REGION 1..7: note = Description of Artificial Sequence: Synthetic peptide
FQSDSDK

SEQ ID NO: 1119 - protein, 9 aa, synthetic construct
  REGION 1..9: note = Description of Artificial Sequence: Synthetic peptide
LIWHTSGWV

SEQ ID NO: 1120 - protein, 8 aa, synthetic construct
  REGION 1..8: note = Description of Artificial Sequence: Synthetic peptide
GYTLTELS

SEQ ID NO: 1121 - protein, 8 aa, synthetic construct
  REGION 1..8: note = Description of Artificial Sequence: Synthetic peptide
FDPEDGET

SEQ ID NO: 1122 - protein, 17 aa, synthetic construct
  REGION 1..17: note = Description of Artificial Sequence: Synthetic peptide
ATGPAAAGVGYYYYMDV

SEQ ID NO: 1123 - protein, 11 aa, synthetic construct
  REGION 1..11: note = Description of Artificial Sequence: Synthetic peptide
QSLLYRNGYNY

SEQ ID NO: 1124 - skipped

SEQ ID NO: 1125 - protein, 9 aa, synthetic construct
  REGION 1..9: note = Description of Artificial Sequence: Synthetic peptide
MQALQTPPT

SEQ ID NO: 1126 - protein, 8 aa, synthetic construct
  REGION 1..8: note = Description of Artificial Sequence: Synthetic peptide
GFTFSSYA

SEQ ID NO: 1127 - protein, 8 aa, synthetic construct
  REGION 1..8: note = Description of Artificial Sequence: Synthetic peptide
ISYDGSNK

SEQ ID NO: 1128 - protein, 20 aa, synthetic construct
  REGION 1..20: note = Description of Artificial Sequence: Synthetic peptide
ARDVMVYCSSTSCYFYGMDV

SEQ ID NO: 1129 - protein, 6 aa, synthetic construct
  REGION 1..6: note = Description of Artificial Sequence: Synthetic peptide
QDIRDY

SEQ ID NO: 1130 - skipped

SEQ ID NO: 1131 - protein, 9 aa, synthetic construct
  REGION 1..9: note = Description of Artificial Sequence: Synthetic peptide
QQFENLPIT

SEQ ID NO: 1132 - protein, 8 aa, synthetic construct
  REGION 1..8: note = Description of Artificial Sequence: Synthetic peptide
GYTLTELS

SEQ ID NO: 1133 - protein, 8 aa, synthetic construct
  REGION 1..8: note = Description of Artificial Sequence: Synthetic peptide
FDPEDGET

SEQ ID NO: 1134 - protein, 18 aa, synthetic construct
  REGION 1..18: note = Description of Artificial Sequence: Synthetic peptide
ATGGYSSGFNYYYYYMDV

SEQ ID NO: 1135 - protein, 11 aa, synthetic construct
  REGION 1..11: note = Description of Artificial Sequence: Synthetic peptide
QSLLYRNGNNY

SEQ ID NO: 1136 - skipped

SEQ ID NO: 1137 - protein, 9 aa, synthetic construct
  REGION 1..9: note = Description of Artificial Sequence: Synthetic peptide
MQALQTPPT

SEQ ID NO: 1138 - protein, 8 aa, synthetic construct
  REGION 1..8: note = Description of Artificial Sequence: Synthetic peptide
GYTLTELS

SEQ ID NO: 1139 - protein, 8 aa, synthetic construct
  REGION 1..8: note = Description of Artificial Sequence: Synthetic peptide
FDPEDGET

SEQ ID NO: 1140 - protein, 14 aa, synthetic construct
  REGION 1..14: note = Description of Artificial Sequence: Synthetic peptide
ATGVTTYYYYGMDV

SEQ ID NO: 1141 - protein, 11 aa, synthetic construct
  REGION 1..11: note = Description of Artificial Sequence: Synthetic peptide
QSLLYSNGNNF

SEQ ID NO: 1142 - skipped

SEQ ID NO: 1143 - protein, 9 aa, synthetic construct
  REGION 1..9: note = Description of Artificial Sequence: Synthetic peptide
MQALQTPPT

SEQ ID NO: 1144 - protein, 8 aa, synthetic construct
  REGION 1..8: note = Description of Artificial Sequence: Synthetic peptide
GFTFSSYG

SEQ ID NO: 1145 - protein, 8 aa, synthetic construct
  REGION 1..8: note = Description of Artificial Sequence: Synthetic peptide
IRYDGSNK

SEQ ID NO: 1146 - protein, 14 aa, synthetic construct
  REGION 1..14: note = Description of Artificial Sequence: Synthetic peptide
ARDLFDFWWDGMDV

SEQ ID NO: 1147 - protein, 7 aa, synthetic construct
  REGION 1..7: note = Description of Artificial Sequence: Synthetic peptide
QSVSSMY

SEQ ID NO: 1148 - skipped

SEQ ID NO: 1149 - protein, 10 aa, synthetic construct
  REGION 1..10: note = Description of Artificial Sequence: Synthetic peptide
QQYVSSPMYT

SEQ ID NO: 1150 - protein, 8 aa, synthetic construct
  REGION 1..8: note = Description of Artificial Sequence: Synthetic peptide
GGTFSSSA

SEQ ID NO: 1151 - protein, 8 aa, synthetic construct
  REGION 1..8: note = Description of Artificial Sequence: Synthetic peptide
IIPIYGIT

SEQ ID NO: 1152 - protein, 22 aa, synthetic construct
  REGION 1..22: note = Description of Artificial Sequence: Synthetic peptide
ARDDTARRVRGVPYYYYYAMDV

SEQ ID NO: 1153 - protein, 6 aa, synthetic construct
  REGION 1..6: note = Description of Artificial Sequence: Synthetic peptide
QSVSSY

SEQ ID NO: 1154 - skipped

SEQ ID NO: 1155 - protein, 9 aa, synthetic construct
  REGION 1..9: note = Description of Artificial Sequence: Synthetic peptide
QQYDDWPQT

SEQ ID NO: 1156 - protein, 8 aa, synthetic construct
  REGION 1..8: note = Description of Artificial Sequence: Synthetic peptide
GGTFNNYG

SEQ ID NO: 1157 - protein, 8 aa, synthetic construct
  REGION 1..8: note = Description of Artificial Sequence: Synthetic peptide
IIPLFGTT

SEQ ID NO: 1158 - protein, 15 aa, synthetic construct
  REGION 1..15: note = Description of Artificial Sequence: Synthetic peptide
ARDRMAADGMAVFDY

SEQ ID NO: 1159 - protein, 8 aa, synthetic construct
  REGION 1..8: note = Description of Artificial Sequence: Synthetic peptide
SSNIGRHF

SEQ ID NO: 1160 - skipped

SEQ ID NO: 1161 - protein, 11 aa, synthetic construct
  REGION 1..11: note = Description of Artificial Sequence: Synthetic peptide
SSWDAALNGVV

SEQ ID NO: 1162 - protein, 8 aa, synthetic construct
  REGION 1..8: note = Description of Artificial Sequence: Synthetic peptide
GYTLTELS

SEQ ID NO: 1163 - protein, 8 aa, synthetic construct
  REGION 1..8: note = Description of Artificial Sequence: Synthetic peptide
FDPEDGET

SEQ ID NO: 1164 - protein, 19 aa, synthetic construct
  REGION 1..19: note = Description of Artificial Sequence: Synthetic peptide
ATEVPMVRGARRYYYYMDV

SEQ ID NO: 1165 - protein, 11 aa, synthetic construct
  REGION 1..11: note = Description of Artificial Sequence: Synthetic peptide
QTLLYINENNY

SEQ ID NO: 1166 - skipped

SEQ ID NO: 1167 - protein, 9 aa, synthetic construct
  REGION 1..9: note = Description of Artificial Sequence: Synthetic peptide
MQGLQTPPT

SEQ ID NO: 1168 - protein, 10 aa, synthetic construct
  REGION 1..10: note = Description of Artificial Sequence: Synthetic peptide
GGSISNSNYY

SEQ ID NO: 1169 - protein, 7 aa, synthetic construct
  REGION 1..7: note = Description of Artificial Sequence: Synthetic peptide
IYYSGST

SEQ ID NO: 1170 - protein, 15 aa, synthetic construct
  REGION 1..15: note = Description of Artificial Sequence: Synthetic peptide
ARGAWELSLGDWFDP

SEQ ID NO: 1171 - protein, 9 aa, synthetic construct
  REGION 1..9: note = Description of Artificial Sequence: Synthetic peptide
SSNIGAGYD

SEQ ID NO: 1172 - skipped

SEQ ID NO: 1173 - protein, 12 aa, synthetic construct
  REGION 1..12: note = Description of Artificial Sequence: Synthetic peptide
QSYDSSLSVYVV

SEQ ID NO: 1174 - protein, 8 aa, synthetic construct
  REGION 1..8: note = Description of Artificial Sequence: Synthetic peptide
GGTFSSSA

SEQ ID NO: 1175 - protein, 8 aa, synthetic construct
  REGION 1..8: note = Description of Artificial Sequence: Synthetic peptide
IIPIYGIT

SEQ ID NO: 1176 - protein, 22 aa, synthetic construct
  REGION 1..22: note = Description of Artificial Sequence: Synthetic peptide
ARDDTARRVRGVPYYYYYAMDV

SEQ ID NO: 1177 - protein, 6 aa, synthetic construct
  REGION 1..6: note = Description of Artificial Sequence: Synthetic peptide
QNVYGE

SEQ ID NO: 1178 - skipped

SEQ ID NO: 1179 - protein, 9 aa, synthetic construct
  REGION 1..9: note = Description of Artificial Sequence: Synthetic peptide
QQRRDWPIT

SEQ ID NO: 1180 - protein, 8 aa, synthetic construct
  REGION 1..8: note = Description of Artificial Sequence: Synthetic peptide
GFTFGTSS

SEQ ID NO: 1181 - protein, 8 aa, synthetic construct
  REGION 1..8: note = Description of Artificial Sequence: Synthetic peptide
ISFDGTEI

SEQ ID NO: 1182 - protein, 15 aa, synthetic construct
  REGION 1..15: note = Description of Artificial Sequence: Synthetic peptide
AKGSGNIYFYSGMDV

SEQ ID NO: 1183 - protein, 6 aa, synthetic construct
  REGION 1..6: note = Description of Artificial Sequence: Synthetic peptide
QSISGW

SEQ ID NO: 1184 - skipped

SEQ ID NO: 1185 - protein, 9 aa, synthetic construct
  REGION 1..9: note = Description of Artificial Sequence: Synthetic peptide
QQYYSYPLT

SEQ ID NO: 1186 - protein, 8 aa, synthetic construct
  REGION 1..8: note = Description of Artificial Sequence: Synthetic peptide
GYTLTELS

SEQ ID NO: 1187 - protein, 8 aa, synthetic construct
  REGION 1..8: note = Description of Artificial Sequence: Synthetic peptide
FDPEDGET

SEQ ID NO: 1188 - protein, 19 aa, synthetic construct
  REGION 1..19: note = Description of Artificial Sequence: Synthetic peptide
ATGVPAAIGVYYYYYYMDV

SEQ ID NO: 1189 - protein, 11 aa, synthetic construct
  REGION 1..11: note = Description of Artificial Sequence: Synthetic peptide
QSLLYSNGYNY

SEQ ID NO: 1190 - skipped

SEQ ID NO: 1191 - protein, 9 aa, synthetic construct
  REGION 1..9: note = Description of Artificial Sequence: Synthetic peptide
MQALQSPVT

SEQ ID NO: 1192 - protein, 8 aa, synthetic construct
  REGION 1..8: note = Description of Artificial Sequence: Synthetic peptide
GYTLTELS

SEQ ID NO: 1193 - protein, 8 aa, synthetic construct
  REGION 1..8: note = Description of Artificial Sequence: Synthetic peptide
FDPEDGET

SEQ ID NO: 1194 - protein, 20 aa, synthetic construct
  REGION 1..20: note = Description of Artificial Sequence: Synthetic peptide
ATDSRDGPAARGGYYYYMDV

SEQ ID NO: 1195 - protein, 11 aa, synthetic construct
  REGION 1..11: note = Description of Artificial Sequence: Synthetic peptide
QSLLYINGYNY

SEQ ID NO: 1196 - skipped

SEQ ID NO: 1197 - protein, 9 aa, synthetic construct
  REGION 1..9: note = Description of Artificial Sequence: Synthetic peptide
MQALQTPPT

SEQ ID NO: 1198 - protein, 8 aa, synthetic construct
  REGION 1..8: note = Description of Artificial Sequence: Synthetic peptide
GGTFSSYA

SEQ ID NO: 1199 - protein, 8 aa, synthetic construct
  REGION 1..8: note = Description of Artificial Sequence: Synthetic peptide
IIPIFGTA

SEQ ID NO: 1200 - protein, 20 aa, synthetic construct
  REGION 1..20: note = Description of Artificial Sequence: Synthetic peptide
ARDAYYYDSSGYYNPDAFDI

SEQ ID NO: 1201 - protein, 11 aa, synthetic construct
  REGION 1..11: note = Description of Artificial Sequence: Synthetic peptide
QSLLHSNGYNY

SEQ ID NO: 1202 - skipped

SEQ ID NO: 1203 - protein, 9 aa, synthetic construct
  REGION 1..9: note = Description of Artificial Sequence: Synthetic peptide
MQGLQTPRT

SEQ ID NO: 1204 - protein, 10 aa, synthetic construct
  REGION 1..10: note = Description of Artificial Sequence: Synthetic peptide
GFSLTSGGMS

SEQ ID NO: 1205 - protein, 7 aa, synthetic construct
  REGION 1..7: note = Description of Artificial Sequence: Synthetic peptide
IDWNDDK

SEQ ID NO: 1206 - protein, 12 aa, synthetic construct
  REGION 1..12: note = Description of Artificial Sequence: Synthetic peptide
ARIRGMTWGFDS

SEQ ID NO: 1207 - protein, 7 aa, synthetic construct
  REGION 1..7: note = Description of Artificial Sequence: Synthetic peptide
QSVSSSY

SEQ ID NO: 1208 - skipped

SEQ ID NO: 1209 - protein, 9 aa, synthetic construct
  REGION 1..9: note = Description of Artificial Sequence: Synthetic peptide
QQYGTTPFA

SEQ ID NO: 1210 - protein, 8 aa, synthetic construct
  REGION 1..8: note = Description of Artificial Sequence: Synthetic peptide
GYTFTAYY

SEQ ID NO: 1211 - protein, 8 aa, synthetic construct
  REGION 1..8: note = Description of Artificial Sequence: Synthetic peptide
INPNSGGT

SEQ ID NO: 1212 - protein, 21 aa, synthetic construct
  REGION 1..21: note = Description of Artificial Sequence: Synthetic peptide
ARDGAFYYGSENYYNAGWFDP

SEQ ID NO: 1213 - protein, 11 aa, synthetic construct
  REGION 1..11: note = Description of Artificial Sequence: Synthetic peptide
QSLLSGNGYNY

SEQ ID NO: 1214 - skipped

SEQ ID NO: 1215 - protein, 9 aa, synthetic construct
  REGION 1..9: note = Description of Artificial Sequence: Synthetic peptide
MQALKSPLT

SEQ ID NO: 1216 - protein, 8 aa, synthetic construct
  REGION 1..8: note = Description of Artificial Sequence: Synthetic peptide
GYTFTNYY

SEQ ID NO: 1217 - protein, 8 aa, synthetic construct
  REGION 1..8: note = Description of Artificial Sequence: Synthetic peptide
INPSGGIT

SEQ ID NO: 1218 - protein, 18 aa, synthetic construct
  REGION 1..18: note = Description of Artificial Sequence: Synthetic peptide
ARAGLGYNWNYAPSGMDV

SEQ ID NO: 1219 - protein, 9 aa, synthetic construct
  REGION 1..9: note = Description of Artificial Sequence: Synthetic peptide
SSDVGGYNY

SEQ ID NO: 1220 - skipped

SEQ ID NO: 1221 - protein, 10 aa, synthetic construct
  REGION 1..10: note = Description of Artificial Sequence: Synthetic peptide
SSYAGSNNLV

SEQ ID NO: 1222 - protein, 10 aa, synthetic construct
  REGION 1..10: note = Description of Artificial Sequence: Synthetic peptide
GGSISSSSYY

SEQ ID NO: 1223 - protein, 7 aa, synthetic construct
  REGION 1..7: note = Description of Artificial Sequence: Synthetic peptide
IYYSGST

SEQ ID NO: 1224 - protein, 15 aa, synthetic construct
  REGION 1..15: note = Description of Artificial Sequence: Synthetic peptide
ARGAWELRLGDWFDP

SEQ ID NO: 1225 - protein, 9 aa, synthetic construct
  REGION 1..9: note = Description of Artificial Sequence: Synthetic peptide
SSNIGAGYD

SEQ ID NO: 1226 - skipped

SEQ ID NO: 1227 - protein, 12 aa, synthetic construct
  REGION 1..12: note = Description of Artificial Sequence: Synthetic peptide
QSYDSSLSVYVV

SEQ ID NO: 1228 - protein, 8 aa, synthetic construct
  REGION 1..8: note = Description of Artificial Sequence: Synthetic peptide
GFTFDDYA

SEQ ID NO: 1229 - protein, 8 aa, synthetic construct
  REGION 1..8: note = Description of Artificial Sequence: Synthetic peptide
ISWNSGSI

SEQ ID NO: 1230 - protein, 15 aa, synthetic construct
  REGION 1..15: note = Description of Artificial Sequence: Synthetic peptide
AKDVNRILVAGMVDY

SEQ ID NO: 1231 - protein, 11 aa, synthetic construct
  REGION 1..11: note = Description of Artificial Sequence: Synthetic peptide
QSLLHSNGYNY

SEQ ID NO: 1232 - skipped

SEQ ID NO: 1233 - protein, 9 aa, synthetic construct
  REGION 1..9: note = Description of Artificial Sequence: Synthetic peptide
MQGLQTPIT

SEQ ID NO: 1234 - protein, 8 aa, synthetic construct
  REGION 1..8: note = Description of Artificial Sequence: Synthetic peptide
RFTFEDYA

SEQ ID NO: 1235 - protein, 8 aa, synthetic construct
  REGION 1..8: note = Description of Artificial Sequence: Synthetic peptide
ISWKSGGI

SEQ ID NO: 1236 - protein, 15 aa, synthetic construct
  REGION 1..15: note = Description of Artificial Sequence: Synthetic peptide
VKDPTLVATDRAFNI

SEQ ID NO: 1237 - protein, 11 aa, synthetic construct
  REGION 1..11: note = Description of Artificial Sequence: Synthetic peptide
QSLLHSNGYNY

SEQ ID NO: 1238 - skipped

SEQ ID NO: 1239 - protein, 9 aa, synthetic construct
  REGION 1..9: note = Description of Artificial Sequence: Synthetic peptide
MQYLQTPDT

SEQ ID NO: 1240 - protein, 8 aa, synthetic construct
  REGION 1..8: note = Description of Artificial Sequence: Synthetic peptide
GGTFSSSA

SEQ ID NO: 1241 - protein, 8 aa, synthetic construct
  REGION 1..8: note = Description of Artificial Sequence: Synthetic peptide
IIPIYGIT

SEQ ID NO: 1242 - protein, 22 aa, synthetic construct
  REGION 1..22: note = Description of Artificial Sequence: Synthetic peptide
ARDDTARRVRGVPYYYYYAMDV

SEQ ID NO: 1243 - protein, 12 aa, synthetic construct
  REGION 1..12: note = Description of Artificial Sequence: Synthetic peptide
QSLLDSDDGNIH

SEQ ID NO: 1244 - skipped

SEQ ID NO: 1245 - protein, 9 aa, synthetic construct
  REGION 1..9: note = Description of Artificial Sequence: Synthetic peptide
MQRKEFPLT

SEQ ID NO: 1246 - protein, 8 aa, synthetic construct
  REGION 1..8: note = Description of Artificial Sequence: Synthetic peptide
GFTFSSYG

SEQ ID NO: 1247 - protein, 8 aa, synthetic construct
  REGION 1..8: note = Description of Artificial Sequence: Synthetic peptide
ISYDGSNK

SEQ ID NO: 1248 - protein, 18 aa, synthetic construct
  REGION 1..18: note = Description of Artificial Sequence: Synthetic peptide
AKEDRLRFLEWLFYGMDV

SEQ ID NO: 1249 - protein, 6 aa, synthetic construct
  REGION 1..6: note = Description of Artificial Sequence: Synthetic peptide
HDIYTY

SEQ ID NO: 1250 - skipped

SEQ ID NO: 1251 - protein, 11 aa, synthetic construct
  REGION 1..11: note = Description of Artificial Sequence: Synthetic peptide
QQYDNHPPEVT

SEQ ID NO: 1252 - protein, 8 aa, synthetic construct
  REGION 1..8: note = Description of Artificial Sequence: Synthetic peptide
GGTFSSSA

SEQ ID NO: 1253 - protein, 8 aa, synthetic construct
  REGION 1..8: note = Description of Artificial Sequence: Synthetic peptide
IIPIYGIT

SEQ ID NO: 1254 - protein, 22 aa, synthetic construct
  REGION 1..22: note = Description of Artificial Sequence: Synthetic peptide
ARDDTARRVRGVPYYYYYAMDV

SEQ ID NO: 1255 - protein, 6 aa, synthetic construct
  REGION 1..6: note = Description of Artificial Sequence: Synthetic peptide
QDIDDD

SEQ ID NO: 1256 - skipped

SEQ ID NO: 1257 - protein, 9 aa, synthetic construct
  REGION 1..9: note = Description of Artificial Sequence: Synthetic peptide
LQHDNLPLT

SEQ ID NO: 1258 - protein, 8 aa, synthetic construct
  REGION 1..8: note = Description of Artificial Sequence: Synthetic peptide
GYTLTELS

SEQ ID NO: 1259 - protein, 8 aa, synthetic construct
  REGION 1..8: note = Description of Artificial Sequence: Synthetic peptide
FDPEDGET

SEQ ID NO: 1260 - protein, 19 aa, synthetic construct
  REGION 1..19: note = Description of Artificial Sequence: Synthetic peptide
ATEDPGPVAGPYYYYGMDV

SEQ ID NO: 1261 - protein, 11 aa, synthetic construct
  REGION 1..11: note = Description of Artificial Sequence: Synthetic peptide
QSLLYINGYHY

SEQ ID NO: 1262 - skipped

SEQ ID NO: 1263 - protein, 9 aa, synthetic construct
  REGION 1..9: note = Description of Artificial Sequence: Synthetic peptide
MQALQTPPT

SEQ ID NO: 1264 - protein, 8 aa, synthetic construct
  REGION 1..8: note = Description of Artificial Sequence: Synthetic peptide
GYMFTNYP

SEQ ID NO: 1265 - protein, 8 aa, synthetic construct
  REGION 1..8: note = Description of Artificial Sequence: Synthetic peptide
INAGTGNT

SEQ ID NO: 1266 - protein, 21 aa, synthetic construct
  REGION 1..21: note = Description of Artificial Sequence: Synthetic peptide
AREGMFYYGLESYYKGGWFDP

SEQ ID NO: 1267 - protein, 11 aa, synthetic construct
  REGION 1..11: note = Description of Artificial Sequence: Synthetic peptide
QSLLHRNGYNY

SEQ ID NO: 1268 - skipped

SEQ ID NO: 1269 - protein, 9 aa, synthetic construct
  REGION 1..9: note = Description of Artificial Sequence: Synthetic peptide
MQALQTPLT

SEQ ID NO: 1270 - protein, 8 aa, synthetic construct
  REGION 1..8: note = Description of Artificial Sequence: Synthetic peptide
GGTFSSSA

SEQ ID NO: 1271 - protein, 8 aa, synthetic construct
  REGION 1..8: note = Description of Artificial Sequence: Synthetic peptide
IIPIYGIT

SEQ ID NO: 1272 - protein, 22 aa, synthetic construct
  REGION 1..22: note = Description of Artificial Sequence: Synthetic peptide
ARDDTARRVRGVPYYYYYAMDV

SEQ ID NO: 1273 - protein, 12 aa, synthetic construct
  REGION 1..12: note = Description of Artificial Sequence: Synthetic peptide
QSLLDSDDGNTY

SEQ ID NO: 1274 - skipped

SEQ ID NO: 1275 - protein, 9 aa, synthetic construct
  REGION 1..9: note = Description of Artificial Sequence: Synthetic peptide
MQRLQFPLT

SEQ ID NO: 1276 - protein, 8 aa, synthetic construct
  REGION 1..8: note = Description of Artificial Sequence: Synthetic peptide
TYTFTTYY

SEQ ID NO: 1277 - protein, 8 aa, synthetic construct
  REGION 1..8: note = Description of Artificial Sequence: Synthetic peptide
IYPSGGNT

SEQ ID NO: 1278 - protein, 13 aa, synthetic construct
  REGION 1..13: note = Description of Artificial Sequence: Synthetic peptide
VRDQNYYYSAMDV

SEQ ID NO: 1279 - protein, 6 aa, synthetic construct
  REGION 1..6: note = Description of Artificial Sequence: Synthetic peptide
QDIRNY

SEQ ID NO: 1280 - skipped

SEQ ID NO: 1281 - protein, 9 aa, synthetic construct
  REGION 1..9: note = Description of Artificial Sequence: Synthetic peptide
QQFENLPIT

SEQ ID NO: 1282 - protein, 8 aa, synthetic construct
  REGION 1..8: note = Description of Artificial Sequence: Synthetic peptide
GGTFSSSA

SEQ ID NO: 1283 - protein, 8 aa, synthetic construct
  REGION 1..8: note = Description of Artificial Sequence: Synthetic peptide
IIPIYGIT

SEQ ID NO: 1284 - protein, 22 aa, synthetic construct
  REGION 1..22: note = Description of Artificial Sequence: Synthetic peptide
ARDDTARRVRGVPYYYYYAMDV

SEQ ID NO: 1285 - protein, 6 aa, synthetic construct
  REGION 1..6: note = Description of Artificial Sequence: Synthetic peptide
RDISDS

SEQ ID NO: 1286 - skipped

SEQ ID NO: 1287 - protein, 9 aa, synthetic construct
  REGION 1..9: note = Description of Artificial Sequence: Synthetic peptide
HQYDNLPLT

SEQ ID NO: 1288 - protein, 8 aa, synthetic construct
  REGION 1..8: note = Description of Artificial Sequence: Synthetic peptide
GFNFRGYA

SEQ ID NO: 1289 - protein, 8 aa, synthetic construct
  REGION 1..8: note = Description of Artificial Sequence: Synthetic peptide
ISGSGGTT

SEQ ID NO: 1290 - protein, 15 aa, synthetic construct
  REGION 1..15: note = Description of Artificial Sequence: Synthetic peptide
AQSYAQIGYGGHIDH

SEQ ID NO: 1291 - protein, 9 aa, synthetic construct
  REGION 1..9: note = Description of Artificial Sequence: Synthetic peptide
SGIDVATYM

SEQ ID NO: 1292 - protein, 7 aa, synthetic construct
  REGION 1..7: note = Description of Artificial Sequence: Synthetic peptide
YKSDSDK

SEQ ID NO: 1293 - protein, 9 aa, synthetic construct
  REGION 1..9: note = Description of Artificial Sequence: Synthetic peptide
LIWHGSHYV

SEQ ID NO: 1294 - protein, 8 aa, synthetic construct
  REGION 1..8: note = Description of Artificial Sequence: Synthetic peptide
GYTLTELS

SEQ ID NO: 1295 - protein, 8 aa, synthetic construct
  REGION 1..8: note = Description of Artificial Sequence: Synthetic peptide
FDPEDGET

SEQ ID NO: 1296 - protein, 19 aa, synthetic construct
  REGION 1..19: note = Description of Artificial Sequence: Synthetic peptide
ATGVPAAIGVYYYYYYMDV

SEQ ID NO: 1297 - protein, 11 aa, synthetic construct
  REGION 1..11: note = Description of Artificial Sequence: Synthetic peptide
QSLLYRNGYNY

SEQ ID NO: 1298 - skipped

SEQ ID NO: 1299 - protein, 9 aa, synthetic construct
  REGION 1..9: note = Description of Artificial Sequence: Synthetic peptide
MQAVQNPPT

SEQ ID NO: 1300 - protein, 8 aa, synthetic construct
  REGION 1..8: note = Description of Artificial Sequence: Synthetic peptide
GGTFSSSA

SEQ ID NO: 1301 - protein, 8 aa, synthetic construct
  REGION 1..8: note = Description of Artificial Sequence: Synthetic peptide
IIPIYGIT

SEQ ID NO: 1302 - protein, 22 aa, synthetic construct
  REGION 1..22: note = Description of Artificial Sequence: Synthetic peptide
ARDDTARRVRGVPYYYYYAMDV

SEQ ID NO: 1303 - protein, 6 aa, synthetic construct
  REGION 1..6: note = Description of Artificial Sequence: Synthetic peptide
QNIDSS

SEQ ID NO: 1304 - skipped

SEQ ID NO: 1305 - protein, 9 aa, synthetic construct
  REGION 1..9: note = Description of Artificial Sequence: Synthetic peptide
HQSSSLPLT

SEQ ID NO: 1306 - protein, 8 aa, synthetic construct
  REGION 1..8: note = Description of Artificial Sequence: Synthetic peptide
GGTFSSSA

SEQ ID NO: 1307 - protein, 8 aa, synthetic construct
  REGION 1..8: note = Description of Artificial Sequence: Synthetic peptide
IIPIYGIT

SEQ ID NO: 1308 - protein, 22 aa, synthetic construct
  REGION 1..22: note = Description of Artificial Sequence: Synthetic peptide
ARDDTARRVRGVPYYYYYAMDV

SEQ ID NO: 1309 - protein, 7 aa, synthetic construct
  REGION 1..7: note = Description of Artificial Sequence: Synthetic peptide
QSVYNNY

SEQ ID NO: 1310 - skipped

SEQ ID NO: 1311 - protein, 10 aa, synthetic construct
  REGION 1..10: note = Description of Artificial Sequence: Synthetic peptide
QQYNSWPPYT

SEQ ID NO: 1312 - protein, 8 aa, synthetic construct
  REGION 1..8: note = Description of Artificial Sequence: Synthetic peptide
GGTFSSYA

SEQ ID NO: 1313 - protein, 8 aa, synthetic construct
  REGION 1..8: note = Description of Artificial Sequence: Synthetic peptide
IIPIFGTA

SEQ ID NO: 1314 - protein, 20 aa, synthetic construct
  REGION 1..20: note = Description of Artificial Sequence: Synthetic peptide
ARDAYYYDSSGYYNPDAFDI

SEQ ID NO: 1315 - protein, 11 aa, synthetic construct
  REGION 1..11: note = Description of Artificial Sequence: Synthetic peptide
QSLLYSNGYNY

SEQ ID NO: 1316 - skipped

SEQ ID NO: 1317 - protein, 9 aa, synthetic construct
  REGION 1..9: note = Description of Artificial Sequence: Synthetic peptide
MQARQTPYT

SEQ ID NO: 1318 - protein, 8 aa, synthetic construct
  REGION 1..8: note = Description of Artificial Sequence: Synthetic peptide
GGTFSSSA

SEQ ID NO: 1319 - protein, 8 aa, synthetic construct
  REGION 1..8: note = Description of Artificial Sequence: Synthetic peptide
IIPIYGIT

SEQ ID NO: 1320 - protein, 22 aa, synthetic construct
  REGION 1..22: note = Description of Artificial Sequence: Synthetic peptide
ARDDTARRVRGVPYYYYYAMDV

SEQ ID NO: 1321 - protein, 6 aa, synthetic construct
  REGION 1..6: note = Description of Artificial Sequence: Synthetic peptide
ESVTTF

SEQ ID NO: 1322 - skipped

SEQ ID NO: 1323 - protein, 9 aa, synthetic construct
  REGION 1..9: note = Description of Artificial Sequence: Synthetic peptide
HQHTNWPLT

SEQ ID NO: 1324 - protein, 8 aa, synthetic construct
  REGION 1..8: note = Description of Artificial Sequence: Synthetic peptide
GYTLTELS

SEQ ID NO: 1325 - protein, 8 aa, synthetic construct
  REGION 1..8: note = Description of Artificial Sequence: Synthetic peptide
FDPEDGET

SEQ ID NO: 1326 - protein, 22 aa, synthetic construct
  REGION 1..22: note = Description of Artificial Sequence: Synthetic peptide
ATEVGYCSGGSCYISYYYGMDV

SEQ ID NO: 1327 - protein, 11 aa, synthetic construct
  REGION 1..11: note = Description of Artificial Sequence: Synthetic peptide
QSLLYRNGHNF

SEQ ID NO: 1328 - skipped

SEQ ID NO: 1329 - protein, 9 aa, synthetic construct
  REGION 1..9: note = Description of Artificial Sequence: Synthetic peptide
MQALQTPPT

SEQ ID NO: 1330 - protein, 8 aa, synthetic construct
  REGION 1..8: note = Description of Artificial Sequence: Synthetic peptide
GGTFSSSA

SEQ ID NO: 1331 - protein, 8 aa, synthetic construct
  REGION 1..8: note = Description of Artificial Sequence: Synthetic peptide
IIPIYGIT

SEQ ID NO: 1332 - protein, 22 aa, synthetic construct
  REGION 1..22: note = Description of Artificial Sequence: Synthetic peptide
ARDDTARRVRGVPYYYYYAMDV

SEQ ID NO: 1333 - protein, 6 aa, synthetic construct
  REGION 1..6: note = Description of Artificial Sequence: Synthetic peptide
QTMNNY

SEQ ID NO: 1334 - skipped

SEQ ID NO: 1335 - protein, 10 aa, synthetic construct
  REGION 1..10: note = Description of Artificial Sequence: Synthetic peptide
QQYGDWLPIT

SEQ ID NO: 1336 - protein, 8 aa, synthetic construct
  REGION 1..8: note = Description of Artificial Sequence: Synthetic peptide
GYTLTELS

SEQ ID NO: 1337 - protein, 8 aa, synthetic construct
  REGION 1..8: note = Description of Artificial Sequence: Synthetic peptide
FDPEDGET

SEQ ID NO: 1338 - protein, 17 aa, synthetic construct
  REGION 1..17: note = Description of Artificial Sequence: Synthetic peptide
ATAFPEATISYYYYMDV

SEQ ID NO: 1339 - protein, 11 aa, synthetic construct
  REGION 1..11: note = Description of Artificial Sequence: Synthetic peptide
QSLLYRNGYNY

SEQ ID NO: 1340 - skipped

SEQ ID NO: 1341 - protein, 9 aa, synthetic construct
  REGION 1..9: note = Description of Artificial Sequence: Synthetic peptide
MQAVQNPPT

SEQ ID NO: 1342 - protein, 8 aa, synthetic construct
  REGION 1..8: note = Description of Artificial Sequence: Synthetic peptide
GGTFSSSA

SEQ ID NO: 1343 - protein, 8 aa, synthetic construct
  REGION 1..8: note = Description of Artificial Sequence: Synthetic peptide
IIPIYGIT

SEQ ID NO: 1344 - protein, 22 aa, synthetic construct
  REGION 1..22: note = Description of Artificial Sequence: Synthetic peptide
ARDDTARRVRGVPYYYYYAMDV

SEQ ID NO: 1345 - protein, 12 aa, synthetic construct
  REGION 1..12: note = Description of Artificial Sequence: Synthetic peptide
RSLLDSDDGNTH

SEQ ID NO: 1346 - skipped

SEQ ID NO: 1347 - protein, 9 aa, synthetic construct
  REGION 1..9: note = Description of Artificial Sequence: Synthetic peptide
MQRKEFPLT

SEQ ID NO: 1348 - protein, 8 aa, synthetic construct
  REGION 1..8: note = Description of Artificial Sequence: Synthetic peptide
GGTFSSYA

SEQ ID NO: 1349 - protein, 8 aa, synthetic construct
  REGION 1..8: note = Description of Artificial Sequence: Synthetic peptide
IIPIFGTA

SEQ ID NO: 1350 - protein, 21 aa, synthetic construct
  REGION 1..21: note = Description of Artificial Sequence: Synthetic peptide
ARGPWYYDSSGYSSYAYYMDV

SEQ ID NO: 1351 - protein, 11 aa, synthetic construct
  REGION 1..11: note = Description of Artificial Sequence: Synthetic peptide
QSLLHSDGYNY

SEQ ID NO: 1352 - skipped

SEQ ID NO: 1353 - protein, 10 aa, synthetic construct
  REGION 1..10: note = Description of Artificial Sequence: Synthetic peptide
MQALHTPGVT

SEQ ID NO: 1354 - protein, 330 aa, Homo sapiens [sequence omitted]

SEQ ID NO: 1355 - protein, 326 aa, Homo sapiens
ASTKGPSVFPLAPCSRSTSESTAALGCLVKDYFPEPVTVSWNSGALTSGVHTFPAVLQSSGLYSLSSVVTVPSSNFGTQTYTCNVDHKPSNTKVDKTVERKCCVECPPCPAPPVAGPSVFLFPPKPKDTLMISRTPEVTCVVVDVSHEDPEVQFNWYVDGVEVHNAKTKPREEQFNSTFRVVSVLTVVHQDWLNGKEYKCKVSNKGLPAPIEKTISKTKGQPREPQVYTLPPSREEMTKNQVSLTCLVKGFYPSDIAVEWESNGQPENNYKTTPPMLDSDGSFFLYSKLTVDKSRWQQGNVFSCSVMHEALHNHYTQKSLSLSPGK

SEQ ID NO: 1356 - protein, 377 aa, Homo sapiens
ASTKGPSVFPLAPCSRSTSGGTAALGCLVKDYFPEPVTVSWNSGALTSGVHTFPAVLQSSGLYSLSSVVTVPSSSLGTQTYTCNVNHKPSNTKVDKRVELKTPLGDTTHTCPRCPEPKSCDTPPPCPRCPEPKSCDTPPPCPRCPEPKSCDTPPPCPRCPAPELLGGPSVFLFPPKPKDTLMISRTPEVTCVVVDVSHEDPEVQFKWYVDGVEVHNAKTKPREEQYNSTFRVVSVLTVLHQDWLNGKEYKCKVSNKALPAPIEKTISKTKGQPREPQVYTLPPSREEMTKNQVSLTCLVKGFYPSDIAVEWESSGQPENNYNTTPPMLDSDGSFFLYSKLTVDKSRWQQGNIFSCSVMHEALHNRFTQKSLSLSPGK

SEQ ID NO: 1357 - protein, 327 aa, Homo sapiens
ASTKGPSVFPLAPCSRSTSESTAALGCLVKDYFPEPVTVSWNSGALTSGVHTFPAVLQSSGLYSLSSVVTVPSSSLGTKTYTCNVDHKPSNTKVDKRVESKYGPPCPSCPAPEFLGGPSVFLFPPKPKDTLMISRTPEVTCVVVDVSQEDPEVQFNWYVDGVEVHNAKTKPREEQFNSTYRVVSVLTVLHQDWLNGKEYKCKVSNKGLPSSIEKTISKAKGQPREPQVYTLPPSQEEMTKNQVSLTCLVKGFYPSDIAVEWESNGQPENNYKTTPPVLDSDGSFFLYSRLTVDKSRWQEGNVFSCSVMHEALHNHYTQKSLSLSLGK

SEQ ID NO: 1358 - protein, 21 aa, Homo sapiens
TTLAVLHPERGIRQWAPARQA

SEQ ID NO: 1359 - protein, 34 aa, Homo sapiens
TTLAVLHPERGIRQWAPARQARWETQSSISLILE

SEQ ID NO: 1360 - protein, 17 aa, Homo sapiens
ARQARWETQSSISLILE

SEQ ID NO: 1361 - protein, 16 aa, Homo sapiens
TFCCKFASFPEGSWEA

SEQ ID NO: 1362 - protein, 24 aa, Homo sapiens
TFCCKFASFPEGSWEACGSLPPSS

SEQ ID NO: 1363 - protein, 15 aa, Homo sapiens
EATELSSFTIRCGFL

SEQ ID NO: 1364 - protein, 22 aa, Homo sapiens
EVWVQVRMEATELSSFTIRCGF

SEQ ID NO: 1365 - protein, 19 aa, Homo sapiens
FTIRCGFLGSGSISLVTVS

SEQ ID NO: 1366 - protein, 24 aa, Homo sapiens
SISLVTVSWGGPNGAGGTTLAVLH

SEQ ID NO: 1367 - protein, 26 aa, Homo sapiens
SISLILEGSGASSPCANTTFCCKFAS

SEQ ID NO: 1368 - protein, 98 aa, synthetic construct
  REGION 1..98: note = Description of Artificial Sequence: Synthetic polypeptide
QVQLVQSGAEVKKPGASVKVSCKASGYTFTSYYMHWVRQAPGQGLEWMGIINPSGGSTSYAQKFQGRVTMTRDTSTSTVYMELSSLRSEDTAVYYCAR

SEQ ID NO: 1369 - protein, 15 aa, synthetic construct
  REGION 1..15: note = Description of Artificial Sequence: Synthetic peptide
YFDYWGQGTLVTVSS

SEQ ID NO: 1370 - protein, 120 aa, synthetic construct
  REGION 1..120: note = Description of Artificial Sequence: Synthetic polypeptide
  MOD_RES 33: note = Asn, Gln, Ser or Ala
  MOD_RES 105: note = Asn, Gln, Ser or Ala
EVQLQQSGPELVKPGASVKISCKASGYTFTDYXINWVKQSHGKSLEWIGYIYPYIGGSGYNQKFKSKATLSADNPSSTAYMELRSLTSEDSAVYYCAREDKTARXAMDYWGQGTPVTVSS

SEQ ID NO: 1371 - protein, 98 aa, synthetic construct
  REGION 1..98: note = Description of Artificial Sequence: Synthetic polypeptide
  MOD_RES 33: note = Tyr, Gln, Ser or Ala
QVQLVQSGAEVKKPGASVKVSCKASGYTFTSYXMHWVRQAPGQGLEWMGIINPSGGSTSYAQKFQGRVTMTRDTSTSTVYMELSSLRSEDTAVYYCAR

SEQ ID NO: 1372 - protein, 120 aa, synthetic construct
  REGION 1..120: note = Description of Artificial Sequence: Synthetic polypeptide
  MOD_RES 33: note = Asn, Gln, Ser or Ala
  MOD_RES 105: note = Asn, Gln, Ser or Ala
QVQLVQSGAEVKKPGASVKVSCKASGYTFTDYXINWVRQAPGQGLEWMGYIYPYIGGSGYAQKFQGRVTMTRDTSTSTVYMELSSLRSEDTAVYYCAREDKTARXAMDYWGQGTLVTVSS

SEQ ID NO: 1373 - protein, 120 aa, synthetic construct
  REGION 1..120: note = Description of Artificial Sequence: Synthetic polypeptide
  MOD_RES 33: note = Asn, Gln, Ser or Ala
  MOD_RES 105: note = Asn, Gln, Ser or Ala
QVQLVQSGAEVKKPGASVKVSCKASGYTFTDYXINWVRQAPGQGLEWIGYIYPYIGGSGYAQKFQGRVTMTADTSTSTVYMELSSLRSEDTAVYYCAREDKTARXAMDYWGQGTLVTVSS

SEQ ID NO: 1374 - protein, 120 aa, synthetic construct
  REGION 1..120: note = Description of Artificial Sequence: Synthetic polypeptide
  MOD_RES 33: note = Asn, Gln, Ser or Ala
  MOD_RES 105: note = Asn, Gln, Ser or Ala
QVQLVQSGAEVKKPGASVKISCKASGYTFTDYXINWVRQAPGQGLEWIGYIYPYIGGSGYAQKFQGRATLTADTSTSTAYMELSSLRSEDTAVYYCAREDKTARXAMDYWGQGTLVTVSS

SEQ ID NO: 1375 - protein, 120 aa, synthetic construct
  REGION 1..120: note = Description of Artificial Sequence: Synthetic polypeptide
  MOD_RES 33: note = Asn, Gln, Ser or Ala
  MOD_RES 105: note = Asn, Gln, Ser or Ala
QVQLVQSGAEVKKPGASVKISCKASGYTFTDYXINWVRQAPGQGLEWIGYIYPYIGGSGYAQKFQGRATLTADNSTSTAYMELSSLRSEDTAVYYCAREDKTARXAMDYWGQGTLVTVSS

SEQ ID NO: 1376 - protein, 96 aa, synthetic construct
  REGION 1..96: note = Description of Artificial Sequence: Synthetic polypeptide
DIQMTQSPSSLSASVGDRVTITCRASQSISSYLNWYQQKPGKAPKLLIYAASSLQSGVPSRFSGSGSGTDFTLTISSLQPEDFATYYCQQSYSTPP

SEQ ID NO: 1377 - protein, 12 aa, synthetic construct
  REGION 1..12: note = Description of Artificial Sequence: Synthetic peptide
YTFGQGTKLEIK

SEQ ID NO: 1378 - protein, 107 aa, synthetic construct
  REGION 1..107: note = Description of Artificial Sequence: Synthetic polypeptide
  MOD_RES 28: note = Asn, Gln, Ser, Ala or Asp
  MOD_RES 32: note = Asn, Gln, Ser, Ala or Asp
  MOD_RES 53: note = Asn, Gln, Ser, Ala or Asp
  MOD_RES 92: note = Trp, Tyr, Phe or His
DIQMTQSPASLSVSVGETVTIICRVSEXIYSXLAWYQQKQGKSPQLLVYEATXLAEGVPSRFSGSGSGTQYSLKINSLQSEDFGSYYCQHFXGTPYTFGGGTKLEIK

SEQ ID NO: 1379 - protein, 96 aa, synthetic construct
  REGION 1..96: note = Description of Artificial Sequence: Synthetic polypeptide
  MOD_RES 28: note = Gln, Ser, Ala or Asp
  MOD_RES 32: note = Tyr, Gln, Ser, Ala or Asp
  MOD_RES 53: note = Gln, Ser, Ala or Asp
  MOD_RES 92: note = Tyr, Phe or His
DIQMTQSPSSLSASVGDRVTITCRASQXISSXLNWYQQKPGKAPKLLIYAASXLQSGVPSRFSGSGSGTDFTLTISSLQPEDFATYYCQQSXSTPP

SEQ ID NO: 1380 - protein, 107 aa, synthetic construct
  REGION 1..107: note = Description of Artificial Sequence: Synthetic polypeptide
  MOD_RES 28: note = Asn, Gln, Ser, Ala or Asp
  MOD_RES 32: note = Asn, Gln, Ser, Ala or Asp
  MOD_RES 53: note = Asn, Gln, Ser, Ala or Asp
  MOD_RES 92: note = Trp, Tyr, Phe or His
DIQMTQSPSSLSASVGDRVTITCRVSEXIYSXLAWYQQKPGKAPKLLIYEATXLAEGVPSRFSGSGSGTDFTLTISSLQPEDFATYYCQHFXGTPYTFGQGTKLEIK

SEQ ID NO: 1381 - protein, 107 aa, synthetic construct
  REGION 1..107: note = Description of Artificial Sequence: Synthetic polypeptide
  MOD_RES 28: note = Asn, Gln, Ser, Ala or Asp
  MOD_RES 32: note = Asn, Gln, Ser, Ala or Asp
  MOD_RES 53: note = Asn, Gln, Ser, Ala or Asp
  MOD_RES 92: note = Trp, Tyr, Phe or His
DIQMTQSPSSLSASVGDRVTITCRVSEXIYSXLAWYQQKPGKAPKLLIYEATXLAEGVPSRFSGSGSGTDYTLTISSLQPEDFATYYCQHFXGTPYTFGQGTKLEIK

SEQ ID NO: 1382 - protein, 107 aa, synthetic construct
  REGION 1..107: note = Description of Artificial Sequence: Synthetic polypeptide
  MOD_RES 28: note = Asn, Gln, Ser, Ala or Asp
  MOD_RES 32: note = Asn, Gln, Ser, Ala or Asp
  MOD_RES 53: note = Asn, Gln, Ser, Ala or Asp
  MOD_RES 92: note = Trp, Tyr, Phe or His
DIQMTQSPSSLSASVGDRVTITCRVSEXIYSXLAWYQQKPGKAPKLLVYEATXLAEGVPSRFSGSGSGTDYTLTISSLQPEDFGTYYCQHFXGTPYTFGQGTKLEIK

SEQ ID NO: 1383 - protein, 98 aa, synthetic construct; identical to SEQ ID NO: 1368
  REGION 1..98: note = Description of Artificial Sequence: Synthetic polypeptide

SEQ ID NO: 1384 - protein, 15 aa, synthetic construct
  REGION 1..15: note = Description of Artificial Sequence: Synthetic peptide
YFDYWGQGTLVTVSS

SEQ ID NO: 1385 - protein, 118 aa, synthetic construct
  REGION 1..118: note = Description of Artificial Sequence: Synthetic polypeptide
  MOD_RES 57: note = Asn, Gln, Ser or Ala
  MOD_RES 59: note = Asn, Gln, Ser or Ala
  MOD_RES 104: note = Met, Leu, Phe or Ala
QVQLQQSGPEVVRPGVSVKISCKGSGYKFPDYVMHWVKQSHAKSLEWIGIISIYSGXTXYNQKFKGKATMTVDKSSSTAYMELARLTSEDSAIYYCAREGDLPXFAYWGQGTLVTVSA

SEQ ID NO: 1386 - protein, 98 aa, synthetic construct
  REGION 1..98: note = Description of Artificial Sequence: Synthetic polypeptide
  MOD_RES 57: note = Gln, Ser or Ala
  MOD_RES 59: note = Gln, Ser or Ala
QVQLVQSGAEVKKPGASVKVSCKASGYTFTSYYMHWVRQAPGQGLEWMGIINPSGGXTXYAQKFQGRVTMTRDTSTSTVYMELSSLRSEDTAVYYCAR

SEQ ID NO: 1387 - protein, 118 aa, synthetic construct
  REGION 1..118: note = Description of Artificial Sequence: Synthetic polypeptide
  MOD_RES 57: note = Asn, Gln, Ser or Ala
  MOD_RES 59: note = Asn, Gln, Ser or Ala
  MOD_RES 104: note = Met, Leu, Phe or Ala
QVQLVQSGAEVKKPGASVKVSCKASGYKFPDYVMHWVRQAPGQGLEWMGIISIYSGXTXYAQKFQGRVTMTRDTSTSTVYMELSSLRSEDTAVYYCAREGDLPXFAYWGQGTLVTVSS

SEQ ID NO: 1388 - protein, 118 aa, synthetic construct
  REGION 1..118: note = Description of Artificial Sequence: Synthetic polypeptide
  MOD_RES 57: note = Asn, Gln, Ser or Ala
  MOD_RES 59: note = Asn, Gln, Ser or Ala
  MOD_RES 104: note = Met, Leu, Phe or Ala
QVQLVQSGAEVKKPGASVKVSCKASGYKFPDYVMHWVRQAPGQGLEWIGIISIYSGXTXYAQKFQGRVTMTVDTSTSTVYMELSSLRSEDTAVYYCAREGDLPXFAYWGQGTLVTVSS

SEQ ID NO: 1389 - protein, 118 aa, synthetic construct
  REGION 1..118: note = Description of Artificial Sequence: Synthetic polypeptide
  MOD_RES 57: note = Asn, Gln, Ser or Ala
  MOD_RES 59: note = Asn, Gln, Ser or Ala
  MOD_RES 104: note = Met, Leu, Phe or Ala
QVQLVQSGAEVKKPGASVKISCKGSGYKFPDYVMHWVRQAPGQGLEWIGIISIYSGXTXYAQKFQGRATMTVDTSTSTAYMELSSLRSEDTAVYYCAREGDLPXFAYWGQGTLVTVSS

SEQ ID NO: 1390 - protein, 118 aa, synthetic construct
  REGION 1..118: note = Description of Artificial Sequence: Synthetic polypeptide
  MOD_RES 57: note = Asn, Gln, Ser or Ala
  MOD_RES 59: note = Asn, Gln, Ser or Ala
  MOD_RES 104: note = Met, Leu, Phe or Ala
QVQLVQSGAEVKKPGASVKISCKGSGYKFPDYVMHWVRQAPGQGLEWIGIISIYSGXTXYAQKFQGRATMTVDKSTSTAYMELSSLRSEDTAVYYCAREGDLPXFAYWGQGTLVTVSS

SEQ ID NO: 1391 - protein, 96 aa, synthetic construct
  REGION 1..96: note = Description of Artificial Sequence: Synthetic polypeptide
EIVLTQSPATLSLSPGERATLSCRASQSVSSYLAWYQQKPGQAPRLLIYDASNRATGIPARFSGSGSGTDFTLTISSLEPEDFAVYYCQQRSNWPP

SEQ ID NO: 1392 - protein, 12 aa, synthetic construct
  REGION 1..12: note = Description of Artificial Sequence: Synthetic peptide
YTFGQGTKLEIK

SEQ ID NO: 1393 - protein, 106 aa, synthetic construct
  REGION 1..106: note = Description of Artificial Sequence: Synthetic polypeptide
  MOD_RES 24: note = Asn, Gln, Ser, Ala or Asp
  MOD_RES 52: note = Asn, Gln, Ser, Ala or Asp
  MOD_RES 90: note = Trp, Tyr, Phe or His
QIVLTQSPAIMSASPGEKVTMTCXASSSVSYMYWYQQKPISSPRLLIYDTSXLASGVPVRFSGSGSGTSYSLTIGRMEAEDAATYYCQQXSSYPLTFGAGTKVEVK

SEQ ID NO: 1394 - protein, 96 aa, synthetic construct
  REGION 1..96: note = Description of Artificial Sequence: Synthetic polypeptide
  MOD_RES 24: note = Arg, Gln, Ser, Ala or Asp
  MOD_RES 53: note = Asn, Gln, Ser, Ala or Asp
  MOD_RES 91: note = Arg, Tyr, Phe or His
EIVLTQSPATLSLSPGERATLSCXASQSVSSYLAWYQQKPGQAPRLLIYDASXRATGIPARFSGSGSGTDFTLTISSLEPEDFAVYYCQQXSNWPP

SEQ ID NO: 1395 - protein, 106 aa, synthetic construct
  REGION 1..106: note = Description of Artificial Sequence: Synthetic polypeptide
  MOD_RES 24: note = Asn, Gln, Ser, Ala or Asp
  MOD_RES 52: note = Asn, Gln, Ser, Ala or Asp
  MOD_RES 90: note = Trp, Tyr, Phe or His
EIVLTQSPATLSLSPGERATLSCXASSSVSYMYWYQQKPGQAPRLLIYDTSXLASGIPARFSGSGSGTDFTLTISSLEPEDFAVYYCQQXSSYPLTFGQGTKLEIK

SEQ ID NO: 1396 - protein, 106 aa, synthetic construct
  REGION 1..106: note = Description of Artificial Sequence: Synthetic polypeptide
  MOD_RES 24: note = Asn, Gln, Ser, Ala or Asp
  MOD_RES 52: note = Asn, Gln, Ser, Ala or Asp
  MOD_RES 90: note = Trp, Tyr, Phe or His
EIVLTQSPATLSLSPGERATLSCXASSSVSYMYWYQQKPGQAPRLLIYDTSXLASGIPARFSGSGSGTDYTLTISSLEPEDFAVYYCQQXSSYPLTFGQGTKLEIK

SEQ ID NO: 1397 - protein, 106 aa, synthetic construct
  REGION 1..106: note = Description of Artificial Sequence: Synthetic polypeptide
  MOD_RES 24: note = Asn, Gln, Ser, Ala or Asp
  MOD_RES 52: note = Asn, Gln, Ser, Ala or Asp
  MOD_RES 90: note = Trp, Tyr, Phe or His
EIVLTQSPATLSLSPGERVTMSCXASSSVSYMYWYQQKPGQAPRLLIYDTSXLASGVPARFSGSGSGTDYTLTISSMEPEDFAVYYCQQXSSYPLTFGQGTKVEIK

SEQ ID NO: 1398 - protein, 98 aa, synthetic construct; identical to SEQ ID NO: 1368
  REGION 1..98: note = Description of Artificial Sequence: Synthetic polypeptide

SEQ ID NO: 1399 - protein, 15 aa, synthetic construct
  REGION 1..15: note = Description of Artificial Sequence: Synthetic peptide
YFDYWGQGTLVTVSS

SEQ ID NO: 1400 - protein, 119 aa, synthetic construct
  REGION 1..119: note = Description of Artificial Sequence: Synthetic polypeptide
  MOD_RES 31: note = Asn, Gln, Ser or Ala
  MOD_RES 52: note = Asn, Gln, Ser or Ala
  MOD_RES 103: note = Asn, Gln, Ser or Ala
  MOD_RES 105: note = Trp, Tyr, Phe or His
QVQLQQSGAELMRPGTSVKVSCKASGYAFTXHLIEWIKQRPGQGLEWIGVIXPGSDSTDYNEKFKDKATLTADKSSSTAYMQLSSLTSDDSAVYFCARSLYYXSXFVYWGQGTLVTVSA

SEQ ID NO: 1401 - protein, 98 aa, synthetic construct
  REGION 1..98: note = Description of Artificial Sequence: Synthetic polypeptide
  MOD_RES 31: note = Gln, Ser or Ala
  MOD_RES 52: note = Asn, Gln, Ser or Ala
QVQLVQSGAEVKKPGASVKVSCKASGYTFTXYYMHWVRQAPGQGLEWMGIIXPSGGSTSYAQKFQGRVTMTRDTSTSTVYMELSSLRSEDTAVYYCAR

SEQ ID NO: 1402 - protein, 119 aa, synthetic construct
  REGION 1..119: note = Description of Artificial Sequence: Synthetic polypeptide
  MOD_RES 31: note = Asn, Gln, Ser or Ala
  MOD_RES 52: note = Asn, Gln, Ser or Ala
  MOD_RES 103: note = Asn, Gln, Ser or Ala
  MOD_RES 105: note = Trp, Tyr, Phe or His
QVQLVQSGAEVKKPGASVKVSCKASGYAFTXHLIEWVRQAPGQGLEWMGVIXPGSDSTDYAQKFQGRVTMTRDTSTSTVYMELSSLRSEDTAVYYCARSLYYXSXFVYWGQGTLVTVSS

SEQ ID NO: 1403 - protein, 119 aa, synthetic construct
  REGION 1..119: note = Description of Artificial Sequence: Synthetic polypeptide
  MOD_RES 31: note = Asn, Gln, Ser or Ala
  MOD_RES 52: note = Asn, Gln, Ser or Ala
  MOD_RES 103: note = Asn, Gln, Ser or Ala
  MOD_RES 105: note = Trp, Tyr, Phe or His
QVQLVQSGAEVKKPGASVKVSCKASGYAFTXHLIEWVRQAPGQGLEWIGVIXPGSDSTDYAQKFQGRVTMTADTSTSTVYMELSSLRSEDTAVYYCARSLYYXSXFVYWGQGTLVTVSS

SEQ ID NO: 1404 - protein, 119 aa, synthetic construct
  REGION 1..119: note = Description of Artificial Sequence: Synthetic polypeptide
  MOD_RES 31: note = Asn, Gln, Ser or Ala
  MOD_RES 52: note = Asn, Gln, Ser or Ala
  MOD_RES 103: note = Asn, Gln, Ser or Ala
  MOD_RES 105: note = Trp, Tyr, Phe or His
QVQLVQSGAEVKKPGASVKVSCKASGYAFTXHLIEWIRQAPGQGLEWIGVIXPGSDSTDYAQKFQGRATLTADTSTSTAYMELSSLRSEDTAVYYCARSLYYXSXFVYWGQGTLVTVSS

SEQ ID NO: 1405 - protein, 119 aa, synthetic construct
  REGION 1..119: note = Description of Artificial Sequence: Synthetic polypeptide
  MOD_RES 31: note = Asn, Gln, Ser or Ala
  MOD_RES 52: note = Asn, Gln, Ser or Ala
  MOD_RES 103: note = Asn, Gln, Ser or Ala
  MOD_RES 105: note = Trp, Tyr, Phe or His
QVQLVQSGAEVKKPGASVKVSCKASGYAFTXHLIEWIRQAPGQGLEWIGVIXPGSDSTDYAQKFQGRATLTADKSTSTAYMELSSLRSEDTAVYYCARSLYYXSXFVYWGQGTLVTVSS

SEQ ID NO: 1406 - protein, 96 aa, synthetic construct; identical to SEQ ID NO: 1376
  REGION 1..96: note = Description of Artificial Sequence: Synthetic polypeptide

SEQ ID NO: 1407 - protein, 12 aa, synthetic construct
  REGION 1..12: note = Description of Artificial Sequence: Synthetic peptide
YTFGQGTKLEIK

SEQ ID NO: 1408 - protein, 107 aa, synthetic construct
  REGION 1..107: note = Description of Artificial Sequence: Synthetic polypeptide
  MOD_RES 28: note = Asn, Gln, Ser, Ala or Asp
  MOD_RES 50: note = Asn, Gln, Ser, Ala or Asp
DIQMTQSPASLSASVGETVTITCRASEXIYSYLAWYQQKRGKSPQLLVYXAKTLVEGVPSRFSGSGSGTQFSLKINSLQPEDFGSYYCQHHYGTPYTFGGGTKLEIK

SEQ ID NO: 1409 - protein, 96 aa, synthetic construct
  REGION 1..96: note = Description of Artificial Sequence: Synthetic polypeptide
  MOD_RES 28: note = Gln, Ser, Ala or Asp
  MOD_RES 50: note = Gln, Ser, Ala or Asp
DIQMTQSPSSLSASVGDRVTITCRASQXISSYLNWYQQKPGKAPKLLIYXASSLQSGVPSRFSGSGSGTDFTLTISSLQPEDFATYYCQQSYSTPP

SEQ ID NO: 1410 - protein, 107 aa, synthetic construct
  REGION 1..107: note = Description of Artificial Sequence: Synthetic polypeptide
  MOD_RES 28: note = Asn, Gln, Ser, Ala or Asp
  MOD_RES 50: note = Asn, Gln, Ser, Ala or Asp
DIQMTQSPSSLSASVGDRVTITCRASEXIYSYLAWYQQKPGKAPKLLIYXAKTLVEGVPSRFSGSGSGTDFTLTISSLQPEDFATYYCQHHYGTPYTFGQGTKLEIK

SEQ ID NO: 1411 - protein, 107 aa, synthetic construct
  REGION 1..107: note = Description of Artificial Sequence: Synthetic polypeptide
  MOD_RES 28: note = Asn, Gln, Ser, Ala or Asp
  MOD_RES 50: note = Asn, Gln, Ser, Ala or Asp
DIQMTQSPSSLSASVGDRVTITCRASEXIYSYLAWYQQKPGKAPKLLVYXAKTLVEGVPSRFSGSGSGTDFTLTISSLQPEDFGTYYCQHHYGTPYTFGQGTKLEIK

SEQ ID NO: 1412 - protein, 98 aa, synthetic construct; identical to SEQ ID NO: 1368
  REGION 1..98: note = Description of Artificial Sequence: Synthetic polypeptide

SEQ ID NO: 1413 - protein, 15 aa, synthetic construct
  REGION 1..15: note = Description of Artificial Sequence: Synthetic peptide
YFDYWGQGTLVTVSS

SEQ ID NO: 1414 - protein, 119 aa, synthetic construct
  REGION 1..119: note = Description of Artificial Sequence: Synthetic polypeptide
  MOD_RES 31: note = Asn, Gln, Ser or Ala
  MOD_RES 52: note = Asn, Gln, Ser or Ala
  MOD_RES 105: note = Trp, Tyr, Phe or His
QVQLQQSGAELVRPGASVKVSCKTSGYAFTXYLIEWVKQRPGQGLEWIGVIXPGSGGIYYNDKFKVKTTLTADKSSSTAYMQLSSLTSDDSAVYFCARSETHDTXFAYWGQGTLVTVSA

SEQ ID NO: 1415 - protein, 98 aa, synthetic construct; identical to SEQ ID NO: 1401
  REGION 1..98: note = Description of Artificial Sequence: Synthetic polypeptide
  MOD_RES 31: note = Gln, Ser or Ala
  MOD_RES 52: note = Asn, Gln, Ser or Ala

SEQ ID NO: 1416 - protein, 119 aa, synthetic construct
  REGION 1..119: note = Description of Artificial Sequence: Synthetic polypeptide
  MOD_RES 31: note = Asn, Gln, Ser or Ala
  MOD_RES 52: note = Asn, Gln, Ser or Ala
  MOD_RES 105: note = Trp, Tyr, Phe or His
QVQLVQSGAEVKKPGASVKVSCKASGYAFTXYLIEWVRQAPGQGLEWMGVIXPGSGGIYYAQKFQGRVTMTRDTSTSTVYMELSSLRSEDTAVYYCARSETHDTXFAYWGQGTLVTVSS

SEQ ID NO: 1417 - protein, 119 aa, synthetic construct
  REGION 1..119: note = Description of Artificial Sequence: Synthetic polypeptide
  MOD_RES 31: note = Asn, Gln, Ser or Ala
  MOD_RES 52: note = Asn, Gln, Ser or Ala
  MOD_RES 105: note = Trp, Tyr, Phe or His
QVQLVQSGAEVKKPGASVKVSCKASGYAFTXYLIEWVRQAPGQGLEWIGVIXPGSGGIYYAQKFQGRVTMTADTSTSTVYMELSSLRSEDTAVYYCARSETHDTXFAYWGQGTLVTVSS

SEQ ID NO: 1418 - protein, 119 aa, synthetic construct
  REGION 1..119: note = Description of Artificial Sequence: Synthetic polypeptide
  MOD_RES 31: note = Asn, Gln, Ser or Ala
  MOD_RES 52: note = Asn, Gln, Ser or Ala
  MOD_RES 105: note = Trp, Tyr, Phe or His
QVQLVQSGAEVKKPGASVKVSCKTSGYAFTXYLIEWVRQAPGQGLEWIGVIXPGSGGIYYAQKFQGRVTLTADTSTSTAYMELSSLRSEDTAVYYCARSETHDTXFAYWGQGTLVTVSS

SEQ ID NO: 1419 - protein, 119 aa, synthetic construct
  REGION 1..119: note = Description of Artificial Sequence: Synthetic polypeptide
  MOD_RES 31: note = Asn, Gln, Ser or Ala
  MOD_RES 52: note = Asn, Gln, Ser or Ala
  MOD_RES 105: note = Trp, Tyr, Phe or His
QVQLVQSGAEVKKPGASVKVSCKTSGYAFTXYLIEWVRQAPGQGLEWIGVIXPGSGGIYYAQKFQGRVTLTADKSTSTAYMELSSLRSEDTAVYYCARSETHDTXFAYWGQGTLVTVSS

SEQ ID NO: 1420 - protein, 96 aa, synthetic construct; identical to SEQ ID NO: 1376
  REGION 1..96: note = Description of Artificial Sequence: Synthetic polypeptide

SEQ ID NO: 1421 - protein, 12 aa, synthetic construct
  REGION 1..12: note = Description of Artificial Sequence: Synthetic peptide
YTFGQGTKLEIK

SEQ ID NO: 1422 - protein, 96 aa, synthetic construct
  REGION 1..96: note = Description of Artificial Sequence: Synthetic polypeptide
DIQMTQSPSSLSASVGDRVTITCRASQGIRNDLGWYQQKPGKAPKRLIYAASSLQSGVPSRFSGSGSGTEFTLTISNLQPEDFATYYCLQHNSYPP

SEQ ID NO: 1423 - protein, 107 aa, synthetic construct
  REGION 1..107: note = Description of Artificial Sequence: Synthetic polypeptide
  MOD_RES 92: note = Trp, Tyr, Phe or His
  MOD_RES 93: note = Asn, Gln, Ser, Ala or Asp
DIVMTQSQKFISTSVGDRVSITCKASQSVRIAVAWFQQKPGQSPKALIYLASTRHTGVPDRFTGSGSGTDFTLTISNVQSEDLADYFCLQHXXYPYTFGGGTKLEIK

SEQ ID NO: 1424 - protein, 96 aa, synthetic construct
  REGION 1..96: note = Description of Artificial Sequence: Synthetic polypeptide
  MOD_RES 92: note = Tyr, Phe or His
  MOD_RES 93: note = Gln, Ser, Ala or Asp
DIQMTQSPSSLSASVGDRVTITCRASQSISSYLNWYQQKPGKAPKLLIYAASSLQSGVPSRFSGSGSGTDFTLTISSLQPEDFATYYCQQSXXTPP

SEQ ID NO: 1425 - protein, 107 aa, synthetic construct
  REGION 1..107: note = Description of Artificial Sequence: Synthetic polypeptide
  MOD_RES 92: note = Trp, Tyr, Phe or His
  MOD_RES 93: note = Asn, Gln, Ser, Ala or Asp
DIQMTQSPSSLSASVGDRVTITCKASQSVRIAVAWYQQKPGKAPKLLIYLASTRHTGVPSRFSGSGSGTDFTLTISSLQPEDFATYYCLQHXXYPYTFGQGTKLEIK

SEQ ID NO: 1426 - protein, 107 aa, synthetic construct
  REGION 1..107: note = Description of Artificial Sequence: Synthetic polypeptide
  MOD_RES 92: note = Trp, Tyr, Phe or His
  MOD_RES 93: note = Asn, Gln, Ser, Ala or Asp
DIQMTQSPSSLSASVGDRVTITCKASQSVRIAVAWFQQKPGKAPKALIYLASTRHTGVPSRFSGSGSGTDFTLTISSVQPEDFATYYCLQHXXYPYTFGQGTKLEIK

SEQ ID NO: 1427 - protein, 98 aa, synthetic construct; identical to SEQ ID NO: 1368
  REGION 1..98: note = Description of Artificial Sequence: Synthetic polypeptide

SEQ ID NO: 1428 - protein, 15 aa, synthetic construct
  REGION 1..15: note = Description of Artificial Sequence: Synthetic peptide
YFDYWGQGTLVTVSS

SEQ ID NO: 1429 - protein, 120 aa, synthetic construct
  REGION 1..120: note = Description of Artificial Sequence: Synthetic polypeptide
  MOD_RES 31: note = Asn, Gln, Ser or Ala
  MOD_RES 33: note = Trp, Tyr, Phe or His
  MOD_RES 59: note = Asn, Gln, Ser or Ala
QVQLQQSGAELVRPGTSVKMSCKAAGYTFTXYXIGWVKQRPGHGLEWIGDIYPGGGYTXYNEKFKGKATLTADTSSSTAYMQLSSLTSEDSAIYYCASPYYGSSYGFAFWGQGTLVTVSA

SEQ ID NO: 1430 - protein, 98 aa, synthetic construct
  REGION 1..98: note = Description of Artificial Sequence: Synthetic polypeptide
  MOD_RES 31: note = Gln, Ser or Ala
  MOD_RES 33: note = Tyr, Phe or His
  MOD_RES 59: note = Gln, Ser or Ala
QVQLVQSGAEVKKPGASVKVSCKASGYTFTXYXMHWVRQAPGQGLEWMGIINPSGGSTXYAQKFQGRVTMTRDTSTSTVYMELSSLRSEDTAVYYCAR

SEQ ID NO: 1431 - protein, 120 aa, synthetic construct
  REGION 1..120: note = Description of Artificial Sequence: Synthetic polypeptide
  MOD_RES 31: note = Asn, Gln, Ser or Ala
  MOD_RES 33: note = Trp, Tyr, Phe or His
  MOD_RES 59: note = Asn, Gln, Ser or Ala
QVQLVQSGAEVKKPGASVKVSCKASGYTFTXYXIGWVRQAPGQGLEWMGDIYPGGGYTXYAQKFQGRVTMTRDTSTSTVYMELSSLRSEDTAVYYCARPYYGSSYGFAFWGQGTLVTVSS

SEQ ID NO: 1432 - protein, 120 aa, synthetic construct
  REGION 1..120: note = Description of Artificial Sequence: Synthetic polypeptide
  MOD_RES 31: note = Asn, Gln, Ser or Ala
  MOD_RES 33: note = Trp, Tyr, Phe or His
  MOD_RES 59: note = Asn, Gln, Ser or Ala
QVQLVQSGAEVKKPGASVKVSCKASGYTFTXYXIGWVRQAPGQGLEWIGDIYPGGGYTXYAQKFQGRVTMTADTSTSTVYMELSSLRSEDTAVYYCASPYYGSSYGFAFWGQGTLVTVSS

SEQ ID NO: 1433 - protein, 120 aa, synthetic construct
  REGION 1..120: note = Description of Artificial Sequence: Synthetic polypeptide
  MOD_RES 31: note = Asn, Gln, Ser or Ala
  MOD_RES 33: note = Trp, Tyr, Phe or His
  MOD_RES 59: note = Asn, Gln, Ser or Ala
QVQLVQSGAEVKKPGASVKMSCKASGYTFTXYXIGWVRQAPGQGLEWIGDIYPGGGYTXYAQKFQGRATLTADTSTSTAYMELSSLRSEDTAVYYCASPYYGSSYGFAFWGQGTLVTVSS

SEQ ID NO: 1434 - protein, 120 aa, synthetic construct
  REGION 1..120: note = Description of Artificial Sequence: Synthetic polypeptide
QVQLVQSGAEVKKPGASVKVSCKASGYTFTDYNINWVRQAPGQGLEWMGYIYPYIGGSGYAQKFQGRVTMTRDTSTSTVYMELSSLRSEDTAVYYCAREDKTARNAMDYWGQGTLVTVSS

SEQ ID NO: 1435 - protein, 120 aa, synthetic construct
  REGION 1..120: note = Description of Artificial Sequence: Synthetic polypeptide
QVQLVQSGAEVKKPGASVKVSCKASGYTFTDYNINWVRQAPGQGLEWIGYIYPYIGGSGYAQKFQGRVTMTADTSTSTVYMELSSLRSEDTAVYYCAREDKTARNAMDYWGQGTLVTVSS

SEQ ID NO: 1436 - protein, 120 aa, synthetic construct
  REGION 1..120: note = Description of Artificial Sequence: Synthetic polypeptide
QVQLVQSGAEVKKPGASVKISCKASGYTFTDYNINWVRQAPGQGLEWIGYIYPYIGGSGYAQKFQGRATLTADTSTSTAYMELSSLRSEDTAVYYCAREDKTARNAMDYWGQGTLVTVSS

SEQ ID NO: 1437 - protein, 120 aa, synthetic construct
  REGION 1..120: note = Description of Artificial Sequence: Synthetic polypeptide
QVQLVQSGAEVKKPGASVKISCKASGYTFTDYNINWVRQAPGQGLEWIGYIYPYIGGSGYAQKFQGRATLTADNSTSTAYMELSSLRSEDTAVYYCAREDKTARNAMDYWGQGTLVTVSS

SEQ ID NO: 1438 - protein, 118 aa, synthetic construct
  REGION 1..118: note = Description of Artificial Sequence: Synthetic polypeptide
QVQLVQSGAEVKKPGASVKVSCKASGYKFPDYVMHWVRQAPGQGLEWMGIISIYSGNTNYAQKFQGRVTMTRDTSTSTVYMELSSLRSEDTAVYYCAREGDLPMFAYWGQGTLVTVSS

SEQ ID NO: 1439 - protein, 118 aa, synthetic construct
  REGION 1..118: note = Description of Artificial Sequence: Synthetic polypeptide
QVQLVQSGAEVKKPGASVKVSCKASGYKFPDYVMHWVRQAPGQGLEWIGIISIYSGNTNYAQKFQGRVTMTVDTSTSTVYMELSSLRSEDTAVYYCAREGDLPMFAYWGQGTLVTVSS

SEQ ID NO: 1440 - protein, 118 aa, synthetic construct
  REGION 1..118: note = Description of Artificial Sequence: Synthetic polypeptide
QVQLVQSGAEVKKPGASVKISCKGSGYKFPDYVMHWVRQAPGQGLEWIGIISIYSGNTNYAQKFQGRATMTVDTSTSTAYMELSSLRSEDTAVYYCAREGDLPMFAYWGQGTLVTVSS

SEQ ID NO: 1441 - protein, 118 aa, synthetic construct
  REGION 1..118: note = Description of Artificial Sequence: Synthetic polypeptide
QVQLVQSGAEVKKPGASVKISCKGSGYKFPDYVMHWVRQAPGQGLEWIGIISIYSGNTNYAQKFQGRATMTVDKSTSTAYMELSSLRSEDTAVYYCAREGDLPMFAYWGQGTLVTVSS

SEQ ID NO: 1442 - protein, 119 aa, synthetic construct
  REGION 1..119: note = Description of Artificial Sequence: Synthetic polypeptide
QVQLVQSGAEVKKPGASVKVSCKASGYAFTNHLIEWVRQAPGQGLEWMGVINPGSDSTDYAQKFQGRVTMTRDTSTSTVYMELSSLRSEDTAVYYCARSLYYNSWFVYWGQGTLVTVSS

SEQ ID NO: 1443 - protein, 119 aa, synthetic construct
  REGION 1..119: note = Description of Artificial Sequence: Synthetic polypeptide
QVQLVQSGAEVKKPGASVKVSCKASGYAFTNHLIEWVRQAPGQGLEWIGVINPGSDSTDYAQKFQGRVTMTADTSTSTVYMELSSLRSEDTAVYYCARSLYYNSWFVYWGQGTLVTVSS

SEQ ID NO: 1444 - protein, 119 aa, synthetic construct
  REGION 1..119: note = Description of Artificial Sequence: Synthetic polypeptide
QVQLVQSGAEVKKPGASVKVSCKASGYAFTNHLIEWIRQAPGQGLEWIGVINPGSDSTDYAQKFQGRATLTADTSTSTAYMELSSLRSEDTAVYYCARSLYYNSWFVYWGQGTLVTVSS

SEQ ID NO: 1445 - protein, 119 aa, synthetic construct
  REGION 1..119: note = Description of Artificial Sequence: Synthetic polypeptide
QVQLVQSGAEVKKPGASVKVSCKASGYAFTNHLIEWIRQAPGQGLEWIGVINPGSDSTDYAQKFQGRATLTADKSTSTAYMELSSLRSEDTAVYYCARSLYYNSWFVYWGQGTLVTVSS

SEQ ID NO: 1446 - protein, 119 aa, synthetic construct
  REGION 1..119: note = Description of Artificial Sequence: Synthetic polypeptide
QVQLVQSGAEVKKPGASVKVSCKASGYAFTNYLIEWVRQAPGQGLEWMGVINPGSGGIYYAQKFQGRVTMTRDTSTSTVYMELSSLRSEDTAVYYCARSETHDTWFAYWGQGTLVTVSS

SEQ ID NO: 1447 - protein, 119 aa, synthetic construct
  REGION 1..119: note = Description of Artificial Sequence: Synthetic polypeptide
QVQLVQSGAEVKKPGASVKVSCKASGYAFTNYLIEWVRQAPGQGLEWIGVINPGSGGIYYAQKFQGRVTMTADTSTSTVYMELSSLRSEDTAVYYCARSETHDTWFAYWGQGTLVTVSS

SEQ ID NO: 1448 - protein, 119 aa, synthetic construct
  REGION 1..119: note = Description of Artificial Sequence: Synthetic polypeptide
QVQLVQSGAEVKKPGASVKVSCKTSGYAFTNYLIEWVRQAPGQGLEWIGVINPGSGGIYYAQKFQGRVTLTADTSTSTAYMELSSLRSEDTAVYYCARSETHDTWFAYWGQGTLVTVSS

SEQ ID NO: 1449 - protein, 119 aa, synthetic construct
  REGION 1..119: note = Description of Artificial Sequence: Synthetic polypeptide
QVQLVQSGAEVKKPGASVKVSCKTSGYAFTNYLIEWVRQAPGQGLEWIGVINPGSGGIYYAQKFQGRVTLTADKSTSTAYMELSSLRSEDTAVYYCARSETHDTWFAYWGQGTLVTVSS

SEQ ID NO: 1450 - protein, 120 aa, synthetic construct
  REGION 1..120: note = Description of Artificial Sequence: Synthetic polypeptide
QVQLVQSGAEVKKPGASVKVSCKASGYTFTNYWIGWVRQAPGQGLEWMGDIYPGGGYTNYAQKFQGRVTMTRDTSTSTVYMELSSLRSEDTAVYYCARPYYGSSYGFAFWGQGTLVTVSS

SEQ ID NO: 1451 - protein, 120 aa, synthetic construct
  REGION 1..120: note = Description of Artificial Sequence: Synthetic polypeptide
QVQLVQSGAEVKKPGASVKVSCKASGYTFTNYWIGWVRQAPGQGLEWIGDIYPGGGYTNYAQKFQGRVTMTADTSTSTVYMELSSLRSEDTAVYYCASPYYGSSYGFAFWGQGTLVTVSS

SEQ ID NO: 1452 - protein, 120 aa, synthetic construct
  REGION 1..120: note = Description of Artificial Sequence: Synthetic polypeptide
QVQLVQSGAEVKKPGASVKMSCKASGYTFTNYWIGWVRQAPGQGLEWIGDIYPGGGYTNYAQKFQGRATLTADTSTSTAYMELSSLRSEDTAVYYCASPYYGSSYGFAFWGQGTLVTVSS

SEQ ID NO: 1453 - protein, 107 aa, synthetic construct
  REGION 1..107: note = Description of Artificial Sequence: Synthetic polypeptide
DIQMTQSPSSLSASVGDRVTITCRVSENIYSNLAWYQQKPGKAPKLLIYEATNLAEGVPSRFSGSGSGTDFTLTISSLQPEDFATYYCQHFWGTPYTFGQGTKLEIK

SEQ ID NO: 1454 - protein, 107 aa, synthetic construct
  REGION 1..107: note = Description of Artificial Sequence: Synthetic polypeptide
DIQMTQSPSSLSASVGDRVTITCRVSENIYSNLAWYQQKPGKAPKLLIYEATNLAEGVPSRFSGSGSGTDYTLTISSLQPEDFATYYCQHFWGTPYTFGQGTKLEIK

SEQ ID NO: 1455 - protein, 107 aa, synthetic construct
  REGION 1..107: note = Description of Artificial Sequence: Synthetic polypeptide
DIQMTQSPSSLSASVGDRVTITCRVSENIYSNLAWYQQKPGKAPKLLVYEATNLAEGVPSRFSGSGSGTDYTLTISSLQPEDFGTYYCQHFWGTPYTFGQGTKLEIK

SEQ ID NO: 1456 - protein, 106 aa, synthetic construct
  REGION 1..106: note = Description of Artificial Sequence: Synthetic polypeptide
EIVLTQSPATLSLSPGERATLSCNASSSVSYMYWYQQKPGQAPRLLIYDTSNLASGIPARFSGSGSGTDFTLTISSLEPEDFAVYYCQQWSSYPLTFGQGTKLEIK

SEQ ID NO: 1457 - protein, 106 aa, synthetic construct
  REGION 1..106: note = Description of Artificial Sequence: Synthetic polypeptide
EIVLTQSPATLSLSPGERATLSCNASSSVSYMYWYQQKPGQAPRLLIYDTSNLASGIPARFSGSGSGTDYTLTISSLEPEDFAVYYCQQWSSYPLTFGQGTKLEIK

SEQ ID NO: 1458 - protein, 106 aa, synthetic construct
  REGION 1..106: note = Description of Artificial Sequence: Synthetic polypeptide
EIVLTQSPATLSLSPGERVTMSCNASSSVSYMYWYQQKPGQAPRLLIYDTSNLASGVPARFSGSGSGTDYTLTISSMEPEDFAVYYCQQWSSYPLTFGQGTKVEIK

SEQ ID NO: 1459 - protein, 107 aa, synthetic construct
  REGION 1..107: note = Description of Artificial Sequence: Synthetic polypeptide
DIQMTQSPSSLSASVGDRVTITCRASENIYSYLAWYQQKPGKAPKLLIYNAKTLVEGVPSRFSGSGSGTDFTLTISSLQPEDFATYYCQHHYGTPYTFGQGTKLEIK

SEQ ID NO: 1460 - protein, 107 aa, synthetic construct
  REGION 1..107: note = Description of Artificial Sequence: Synthetic polypeptide
DIQMTQSPSSLSASVGDRVTITCRASENIYSYLAWYQQKPGKAPKLLVYNAKTLVEGVPSRFSGSGSGTDFTLTISSLQPEDFGTYYCQHHYGTPYTFGQGTKLEIK

SEQ ID NO: 1461 - protein, 107 aa, synthetic construct
  REGION 1..107: note = Description of Artificial Sequence: Synthetic polypeptide
DIQMTQSPSSLSASVGDRVTITCKASQSVRIAVAWYQQKPGKAPKLLIYLASTRHTGVPSRFSGSGSGTDFTLTISSLQPEDFATYYCLQHWNYPYTFGQGTKLEIK

SEQ ID NO: 1462 - protein, 107 aa, synthetic construct
  REGION 1..107: note = Description of Artificial Sequence: Synthetic polypeptide
DIQMTQSPSSLSASVGDRVTITCKASQSVRIAVAWFQQKPGKAPKALIYLASTRHTGVPSRFSGSGSGTDFTLTISSVQPEDFATYYCLQHWNYPYTFGQGTKLEIK

SEQ ID NO: 1463 - protein, 131 aa, Homo sapiens
TPEVWVQVRMEATELSSFTIRCGFLGSGSISLVTVSWGGPNGAGGTTLAVLHPERGIRQWAPARQARWETQSSISLILEGSGASSPCANTTFCCKFASFPEGSWEACGSLPPSSDPGLSAPPTPAPILRAD

SEQ ID NO: 1464 - protein, 131 aa, Macaca fascicularis
TPEVWVQVQMEATELSSFTVHCGFLGPGSISLVTVSWGGPDGAGGTKLAVLHPELGTRQWAPARQARWETQSSISLALEDSGASSPFANTTFCCKFASFPEGSWESCGSLPPSSDPGLSAPPTPVPILRAD

SEQ ID NO: 1465 - protein, 126 aa, Callithrix jacchus
TPEVWVQVQMKATELSSFIVHCGFLGSGSISLVTVSWGGPDGAGGTRLAVLHPELGTRQWAPAHQARWETQSSISLVLEEPGASSPSANTTFCCKFASFPEGSWEACGSLPPSSDPGLSAPILRAD

SEQ ID NO: 1466 - protein, 131 aa, Macaca mulatta; identical to SEQ ID NO: 1464

SEQ ID NO: 1467 - protein, 131 aa, Homo sapiens; identical to SEQ ID NO: 1463

SEQ ID NO: 1468 - protein, 151 aa, Homo sapiens
MGHRTLVLPWVLLTLCVTAGTPEVWVQVRMEATELSSFTIRCGFLGSGSISLVTVSWGGPNGAGGTTLAVLHPERGIRQWAPARQARWETQSSISLILEGSGASSPCANTTFCCKFASFPEGSWEACGSLPPSSDPGLSAPPTPAPILRAD

SEQ ID NO: 1469 - protein, 104 aa, Homo sapiens
EVWVQVRMEATELSSFTIRCGFLGSGSISLVTVSWGGPNGAGGTTLAVLHPERGIRQWAPARQARWETQSSISLILEGSGASSPCANTTFCCKFASFPEGSWEA

SEQ ID NO: 1470 - protein, 179 aa, synthetic construct
  REGION 1..179: note = Description of Artificial Sequence: Synthetic polypeptide
MGHRTLVLPWVLLTLCVTAGTPEVWVQVRMEATELSSFTIRCGFLGSGSISLVTVSWGGPNGAGGTTLAVLHPERGIRQWAPARQARWETQSSISLILEGSGASSPCANTTFCCKFASFPEGSWEACGSLPPSSDPGLSAPPTPAPILRADLAGILGVSGVLLFGCVYLLHLLRRHKHR

SEQ ID NO: 1471 - protein, 191 aa, synthetic construct
  REGION 1..191: note = Description of Artificial Sequence: Synthetic polypeptide
MGHRTLVLPWVLLTLCVTAGTPEVWVQVRMEATELSSFTIRCGFLGSGSISLVTVSWGGPNGAGGTTLAVLHPERGIRQWAPARQARWETQSSISLILEGSGASSPCANTTFCCKFASFPEGSWEACGSLPPSSDPGLSVPPTPAPILRADLAGILGVSGVLLFDCGYLLHLLCRQKHRPAPRLQPSHTSS

SEQ ID NO: 1472 - protein, 211 aa, synthetic construct
  REGION 1..211: note = Description of Artificial Sequence: Synthetic polypeptide
MGHRTLVLPWVLLTLCVTAGTPEVWVQVRMEATELSSFTIRWLSAPPTPAPILRADLAGILGVSGVLLFGCVYLLHLLRRHKHRPAPRLQPSRTSPQAPRARAWAPSQASQAALHVPYATINTSCRPATLDTAHPHGGPSWWASLPTHAAHRPQGPAAWASTPIPARGSFVSVENGLYAQAGERPPHTGPGLTLFPDPRGPRAMEGPLGVR

SEQ ID NO: 1473 - protein, 189 aa, synthetic construct
  REGION 1..189: note = Description of Artificial Sequence: Synthetic polypeptide
MGHRTLVLPWVLLTLCVTAGLSAPPTPAPILRADLAGILGVSGVLLFGCVYLLHLLRRHKHRPAPRLQPSRTSPQAPRARAWAPSQASQAALHVPYATINTSCRPATLDTAHPHGGPSWWASLPTHAAHRPQGPAAWASTPIPARGSFVSVENGLYAQAGERPPHTGPGLTLFPDPRGPRAMEGPLGVR

SEQ ID NO: 1474 - protein, 74 aa, synthetic construct
  REGION 1..74: note = Description of Artificial Sequence: Synthetic polypeptide
MGHRTLVLPWVLLTLCVTAGLSVPPTPAPILRADLAGILGVSGVLLFDCGYLLHLLCRQKHRPAPRLQPSHTSS

SEQ ID NO: 1475 - protein, 203 aa, synthetic construct [sequence omitted]

SEQ ID NO: 1476 - protein, 230 aa, synthetic construct
  REGION 1..230: note = Description of Artificial Sequence: Synthetic polypeptide
MGHRTLVLPWVLLTLCVTAGTPEVWVQVRMEATELSSFTIRCGFLGSGSISLVTVSWGGPNGAGGTTLAVLHPERGAQISPRGPKIGGPPCPRPGPAGKPRAASLSSWKALGPAAPAPTPPSAASLRPSQAALHVPYATINTSCRPATLDTAHPHGGPSWWASLPTHAAHRPQGPAAWASTPIPARGSFVSVENGLYAQAGERPPHTGPGLTLFPDPRGPRAMEGPLGVR

SEQ ID NO: 1477 - protein, 182 aa, synthetic construct
  REGION 1..182: note = Description of Artificial Sequence: Synthetic polypeptide
MGHRTLVLPWVLLTLCVTAGTPEVWVQVRMEATELSSFTIRCGFLGSGSISLVTVSWGGPNGAGGTTLAVLHPERGIRQWAPARQARWETQSSISLILEGSGASSPCANTTFCCKFASFPGCSSRPLCHYQHQLPPSYFGHSSPPWGAVLVGVTPHPRCTPAPGPCRLGLHTHPCTWQLCLC

SEQ ID NO: 1478 - protein, 183 aa, synthetic construct
  REGION 1..183: note = Description of Artificial Sequence: Synthetic polypeptide
TPEVWVQVRMEATELSSFTIRCGFLGSGSISLVTVSWGGPNGAGGTTLAVLHPERGIRQWAPARQARWETQSSISLILEGSGASSPCANTTFCCKFASFPEGSWEACGSLPPSSDPGGAGARGPGGQGGARELATHLILVSVPRALCPADSCPHSAGRPGRDLGGLRSPPLWLCLPPSSAAPT

SEQ ID NO: 1479 - protein, 210 aa, synthetic construct
  REGION 1..210: note = Description of Artificial Sequence: Synthetic polypeptide
TPEVWVQVRMEATELSSFTIRCGFLGSGSISLVTVSWGGPNGAGGTTLAVLHPERGAQISPRGPKIGGPPCPRPGPAGKPRAASLSSWKALGPAAPAPTPPSAASLRPSQAALHVPYATINTSCRPATLDTAHPHGGPSWWASLPTHAAHRPQGPAAWASTPIPARGSFVSVENGLYAQAGERPPHTGPGLTLFPDPRGPRAMEGPLGVR

SEQ ID NO: 1480 - protein, 162 aa, synthetic construct
  REGION 1..162: note = Description of Artificial Sequence: Synthetic polypeptide
TPEVWVQVRMEATELSSFTIRCGFLGSGSISLVTVSWGGPNGAGGTTLAVLHPERGIRQWAPARQARWETQSSISLILEGSGASSPCANTTFCCKFASFPGCSSRPLCHYQHQLPPSYFGHSSPPWGAVLVGVTPHPRCTPAPGPCRLGLHTHPCTWQLCLC

SEQ ID NO: 1481 - protein, 66 aa, synthetic construct
  REGION 1..66: note = Description of Artificial Sequence: Synthetic polypeptide
GAGARGPGGQGGARELATHLILVSVPRALCPADSCPHSAGRPGRDLGGLRSPPLWLCLPPSSAAPT

SEQ ID NO: 1482 - protein, 154 aa, synthetic construct
  REGION 1..154: note = Description of Artificial Sequence: Synthetic polypeptide
AQISPRGPKIGGPPCPRPGPAGKPRAASLSSWKALGPAAPAPTPPSAASLRPSQAALHVPYATINTSCRPATLDTAHPHGGPSWWASLPTHAAHRPQGPAAWASTPIPARGSFVSVENGLYAQAGERPPHTGPGLTLFPDPRGPRAMEGPLGVR

SEQ ID NO: 1483 - protein, 52 aa, synthetic construct
  REGION 1..52: note = Description of Artificial Sequence: Synthetic polypeptide
AQISPRGPKIGGPPCPRPGPAGKPRAASLSSWKALGPAAPAPTPPSAASLRP

SEQ ID NO: 1484 - protein, 62 aa, synthetic construct
  REGION 1..62: note = Description of Artificial Sequence: Synthetic polypeptide
GCSSRPLCHYQHQLPPSYFGHSSPPWGAVLVGVTPHPRCTPAPGPCRLGLHTHPCTWQLCLC

SEQ ID NO: 1485 - protein, 129 aa, Homo sapiens
TPEVWVQVRMEATELSSFTIRCGFLGSGSISLVTVSWGGPNGAGGTTLAVLHPERGIRQWAPARQARWETQSSISLILEGSGASSPCANTTFCCKFASFPEGSWEACGSLPPSSDPGLSAPPTPAPILR

SEQ ID NO: 1486 - protein, 130 aa, Homo sapiens
TPEVWVQVRMEATELSSFTIRCGFLGSGSISLVTVSWGGPNGAGGTTLAVLHPERGIRQWAPARQARWETQSSISLILEGSGASSPCANTTFCCKFASFPEGSWEACGSLPPSSDPGLSAPPTPAPILRA

SEQ ID NO: 1487 - protein, 132 aa, Homo sapiens
TPEVWVQVRMEATELSSFTIRCGFLGSGSISLVTVSWGGPNGAGGTTLAVLHPERGIRQWAPARQARWETQSSISLILEGSGASSPCANTTFCCKFASFPEGSWEACGSLPPSSDPGLSAPPTPAPILRADL

SEQ ID NO: 1488 - protein, 133 aa, Homo sapiens
TPEVWVQVRMEATELSSFTIRCGFLGSGSISLVTVSWGGPNGAGGTTLAVLHPERGIRQWAPARQARWETQSSISLILEGSGASSPCANTTFCCKFASFPEGSWEACGSLPPSSDPGLSAPPTPAPILRADLA

SEQ ID NO: 1489 - protein, 104 aa, Homo sapiens
TPEVWVQVRMEATELSSFTIRCGFLGSGSISLVTVSWGGPNGAGGTTLAVLHPERGIRQWAPARQARWETQSSISLILEGSGASSPCANTTFCCKFASFPEGSW

SEQ ID NO: 1490 - protein, 105 aa, Homo sapiens
TPEVWVQVRMEATELSSFTIRCGFLGSGSISLVTVSWGGPNGAGGTTLAVLHPERGIRQWAPARQARWETQSSISLILEGSGASSPCANTTFCCKFASFPEGSWE

SEQ ID NO: 1491 - protein, 106 aa, Homo sapiens
TPEVWVQVRMEATELSSFTIRCGFLGSGSISLVTVSWGGPNGAGGTTLAVLHPERGIRQWAPARQARWETQSSISLILEGSGASSPCANTTFCCKFASFPEGSWEA

SEQ ID NO: 1492 - protein, 107 aa, Homo sapiens
TPEVWVQVRMEATELSSFTIRCGFLGSGSISLVTVSWGGPNGAGGTTLAVLHPERGIRQWAPARQARWETQSSISLILEGSGASSPCANTTFCCKFASFPEGSWEAC

SEQ ID NO: 1493 - protein, 108 aa, Homo sapiens
TPEVWVQVRMEATELSSFTIRCGFLGSGSISLVTVSWGGPNGAGGTTLAVLHPERGIRQWAPARQARWETQSSISLILEGSGASSPCANTTFCCKFASFPEGSWEACG

SEQ ID NO: 1494 - protein, 103 aa, Homo sapiens
PEVWVQVRMEATELSSFTIRCGFLGSGSISLVTVSWGGPNGAGGTTLAVLHPERGIRQWAPARQARWETQSSISLILEGSGASSPCANTTFCCKFASFPEGSW

SEQ ID NO: 1495 - protein, 104 aa, Homo sapiens
PEVWVQVRMEATELSSFTIRCGFLGSGSISLVTVSWGGPNGAGGTTLAVLHPERGIRQWAPARQARWETQSSISLILEGSGASSPCANTTFCCKFASFPEGSWE

SEQ ID NO: 1496 - protein, 105 aa, Homo sapiens
PEVWVQVRMEATELSSFTIRCGFLGSGSISLVTVSWGGPNGAGGTTLAVLHPERGIRQWAPARQARWETQSSISLILEGSGASSPCANTTFCCKFASFPEGSWEA

SEQ ID NO: 1497 - protein, 106 aa, Homo sapiens
PEVWVQVRMEATELSSFTIRCGFLGSGSISLVTVSWGGPNGAGGTTLAVLHPERGIRQWAPARQARWETQSSISLILEGSGASSPCANTTFCCKFASFPEGSWEAC

SEQ ID NO: 1498 - protein, 107 aa, Homo sapiens
PEVWVQVRMEATELSSFTIRCGFLGSGSISLVTVSWGGPNGAGGTTLAVLHPERGIRQWAPARQARWETQSSISLILEGSGASSPCANTTFCCKFASFPEGSWEACG

SEQ ID NO: 1499 - protein, 102 aa, Homo sapiens
EVWVQVRMEATELSSFTIRCGFLGSGSISLVTVSWGGPNGAGGTTLAVLHPERGIRQWAPARQARWETQSSISLILEGSGASSPCANTTFCCKFASFPEGSW

SEQ ID NO: 1500 - protein, 103 aa, Homo sapiens
EVWVQVRMEATELSSFTIRCGFLGSGSISLVTVSWGGPNGAGGTTLAVLHPERGIRQWAPARQARWETQSSISLILEGSGASSPCANTTFCCKFASFPEGSWE

SEQ ID NO: 1501 - protein, 105 aa, Homo sapiens
EVWVQVRMEATELSSFTIRCGFLGSGSISLVTVSWGGPNGAGGTTLAVLHPERGIRQWAPARQARWETQSSISLILEGSGASSPCANTTFCCKFASFPEGSWEAC

SEQ ID NO: 1502 - protein, 106 aa, Homo sapiens
EVWVQVRMEATELSSFTIRCGFLGSGSISLVTVSWGGPNGAGGTTLAVLHPERGIRQWAPARQARWETQSSISLILEGSGASSPCANTTFCCKFASFPEGSWEACG

SEQ ID NO: 1503 - protein, 101 aa, Homo sapiens
VWVQVRMEATELSSFTIRCGFLGSGSISLVTVSWGGPNGAGGTTLAVLHPERGIRQWAPARQARWETQSSISLILEGSGASSPCANTTFCCKFASFPEGSW

SEQ ID NO: 1504 - protein, 102 aa, Homo sapiens
VWVQVRMEATELSSFTIRCGFLGSGSISLVTVSWGGPNGAGGTTLAVLHPERGIRQWAPARQARWETQSSISLILEGSGASSPCANTTFCCKFASFPEGSWE

SEQ ID NO: 1505 - protein, 103 aa, Homo sapiens
VWVQVRMEATELSSFTIRCGFLGSGSISLVTVSWGGPNGAGGTTLAVLHPERGIRQWAPARQARWETQSSISLILEGSGASSPCANTTFCCKFASFPEGSWEA

SEQ ID NO: 1506 - protein, 104 aa, Homo sapiens
VWVQVRMEATELSSFTIRCGFLGSGSISLVTVSWGGPNGAGGTTLAVLHPERGIRQWAPARQARWETQSSISLILEGSGASSPCANTTFCCKFASFPEGSWEAC

SEQ ID NO: 1507 - protein, 105 aa, Homo sapiens
VWVQVRMEATELSSFTIRCGFLGSGSISLVTVSWGGPNGAGGTTLAVLHPERGIRQWAPARQARWETQSSISLILEGSGASSPCANTTFCCKFASFPEGSWEACG

SEQ ID NO: 1508 - protein, 100 aa, Homo sapiens
WVQVRMEATELSSFTIRCGFLGSGSISLVTVSWGGPNGAGGTTLAVLHPERGIRQWAPARQARWETQSSISLILEGSGASSPCANTTFCCKFASFPEGSW

SEQ ID NO: 1509 - protein, 101 aa, Homo sapiens
WVQVRMEATELSSFTIRCGFLGSGSISLVTVSWGGPNGAGGTTLAVLHPERGIRQWAPARQARWETQSSISLILEGSGASSPCANTTFCCKFASFPEGSWE

SEQ ID NO: 1510 - protein, 102 aa, Homo sapiens
WVQVRMEATELSSFTIRCGFLGSGSISLVTVSWGGPNGAGGTTLAVLHPERGIRQWAPARQARWETQSSISLILEGSGASSPCANTTFCCKFASFPEGSWEA

SEQ ID NO: 1511 - protein, 103 aa, Homo sapiens
WVQVRMEATELSSFTIRCGFLGSGSISLVTVSWGGPNGAGGTTLAVLHPERGIRQWAPARQARWETQSSISLILEGSGASSPCANTTFCCKFASFPEGSWEAC

SEQ ID NO: 1512 - protein, 104 aa, Homo sapiens
WVQVRMEATELSSFTIRCGFLGSGSISLVTVSWGGPNGAGGTTLAVLHPERGIRQWAPARQARWETQSSISLILEGSGASSPCANTTFCCKFASFPEGSWEACG

SEQ ID NO: 1513 - protein, 234 aa, Mus musculus
MRTGNTQAAHATNMGQMQTLVLFSTLLTLCVSEASPEVWVQVQMEATNLSSFSVHCGVLGYSLISLVTVSCEGFVDAGRTKLAVLHPEFGTQQWAPARQAHWETPNSVSVTLTMGQSKARSSLANTTFCCEFVTFPHGSRVACRDLHRSDPGLSAPTPALNLQADLVRILGTSGVFLFGFIFILCLRWQQRHWCLSKSQPSLTSTQAQVETQPPHLASTHSSFISMENGLYALA

SEQ ID NO: 1514 - protein, 221 aa, Mus musculus
MGQMQTLVLFSTLLTLCVSEASPEVWVQVQMEATNLSSFSVHCGVLGYSLISLVTVSCEGFVDAGRTKLAVLHPEFGTQQWAPARQAHWETPNSVSVTLTMGQSKARSSLANTTFCCEFVTFPHGSRVACRDLHRSDPGLSAPTPALNLQADLVRILGTSGVFLFGFIFILCLRWQQRHWCLSKSQPSLTSTQAQVETQPPHLASTHSSFISMENGLYALA

SEQ ID NO: 1515 - protein, 131 aa, Mus musculus
SPEVWVQVQMEATNLSSFSVHCGVLGYSLISLVTVSCEGFVDAGRTKLAVLHPEFGTQQWAPARQAHWETPNSVSVTLTMGQSKARSSLANTTFCCEFVTFPHGSRVACRDLHRSDPGLSAPTPALNLQAD

SEQ ID NO: 1516 - protein, 152 aa, Mus musculus
MGQMQTLVLFSTLLTLCVSEASPEVWVQVQMEATNLSSFSVHCGVLGYSLISLVTVSCEGFVDAGRTKLAVLHPEFGTQQWAPARQAHWETPNSVSVTLTMGQSKARSSLANTTFCCEFVTFPHGSRVACRDLHRSDPGLSAPTPALNLQAD

SEQ ID NO: 1517 - protein, 363 aa, synthetic construct
  REGION 1..363: note = Description of Artificial Sequence: Synthetic polypeptide
TPEVWVQVRMEATELSSFTIRCGFLGSGSISLVTVSWGGPNGAGGTTLAVLHPERGIRQWAPARQARWETQSSISLILEGSGASSPCANTTFCCKFASFPEGSWEACGSLPPSSDPGLSAPPTPAPILRADEPKSSDKTHTCPPCPAPELLGGPSVFLFPPKPKDTLMISRTPEVTCVVVDVSHEDPEVKFNWYVDGVEVHNAKTKPREEQYNSTYRVVSVLTVLHQDWLNGKEYKCKVSNKALPAPIEKTISKAKGQPREPQVYTLPPSRDELTKNQVSLTCLVKGFYPSDIAVEWESNGQPENNYKTTPPVLDSDGSFFLYSKLTVDKSRWQQGNVFSCSVMHEALHNHYTQKSLSLSPGK

SEQ ID NO: 1518 - protein, 363 aa, synthetic construct
  REGION 1..363: note = Description of Artificial Sequence: Synthetic polypeptide
TPEVWVQVRMEATELSSFTIRCGFLGSGSISLVTVSWGGPNGAGGTTLAVLHPERGIRQWAPARQARWETQSSISLILEGSGASSPFANTTFCCKFASFPEGSWEASGSLPPSSDPGLSAPPTPAPILRADEPKSSDKTHTCPPCPAPELLGGPSVFLFPPKPKDTLMISRTPEVTCVVVDVSHEDPEVKFNWYVDGVEVHNAKTKPREEQYNSTYRVVSVLTVLHQDWLNGKEYKCKVSNKALPAPIEKTISKAKGQPREPQVYTLPPSRDELTKNQVSLTCLVKGFYPSDIAVEWESNGQPENNYKTTPPVLDSDGSFFLYSKLTVDKSRWQQGNVFSCSVMHEALHNHYTQKSLSLSPGK

SEQ ID NO: 1519 - protein, 363 aa, synthetic construct
  REGION 1..363: note = Description of Artificial Sequence: Synthetic polypeptide
TPEVWVQVRMEATELSSFTIRCGFLGSGSISLVTVSWGGPNGAGGTTLAVLHPERGIRQWAPARQARWETQSSISLILEGSGASSPCANTTFCCKFASFPEGSWEACGSLPPSSDPGLSAPPTPAPILRADEPKSSDKTHTSPPSPAPELLGGPSVFLFPPKPKDTLMISRTPEVTCVVVDVSHEDPEVKFNWYVDGVEVHNAKTKPREEQYNSTYRVVSVLTVLHQDWLNGKEYKCKVSNKALPAPIEKTISKAKGQPREPQVYTLPPSRDELTKNQVSLTCLVKGFYPSDIAVEWESNGQPENNYKTTPPVLDSDGSFFLYSKLTVDKSRWQQGNVFSCSVMHEALHNHYTQKSLSLSPGK

SEQ ID NO: 1520 - protein, 363 aa, synthetic construct
  REGION 1..363: note = Description of Artificial Sequence: Synthetic polypeptide
TPEVWVQVRMEATELSSFTIRCGFLGSGSISLVTVSWGGPNGAGGTTLAVLHPERGIRQWAPARQARWETQSSISLILEGSGASSPFANTTFCCKFASFPEGSWEACGSLPPSSDPGLSAPPTPAPILRADEPKSSDKTHTSPPSPAPELLGGPSVFLFPPKPKDTLMISRTPEVTCVVVDVSHEDPEVKFNWYVDGVEVHNAKTKPREEQYNSTYRVVSVLTVLHQDWLNGKEYKCKVSNKALPAPIEKTISKAKGQPREPQVYTLPPSRDELTKNQVSLTCLVKGFYPSDIAVEWESNGQPENNYKTTPPVLDSDGSFFLYSKLTVDKSRWQQGNVFSCSVMHEALHNHYTQKSLSLSPGK

SEQ ID NO: 1521 - protein, 364 aa, synthetic construct
  REGION 1..364: note = Description of Artificial Sequence: Synthetic polypeptide
SPEVWVQVQMEATNLSSFSVHCGVLGYSLISLVTVSCEGFVDAGRTKLAVLHPEFGTQQWAPARQAHWETPNSVSVTLTMGQSKARSSLANTTFCCEFVTFPHGSRVACRDLHRSDPGLSAPTPALNLQADEPRGPTIKPCPPCKCPAPNLLGGPSVFIFPPKIKDVLMISLSPIVTCVVVDVSEDDPDVQISWFVNNVEVHTAQTQTHREDYNSTLRVVSALPIQHQDWMSGKEFKCKVNNKDLPAPIERTISKPKGSVRAPQVYVLPPPEEEMTKKQVTLTCMVTDFMPEDIYVEWTNNGKTELNYKNTEPVLDSDGSYFMYSKLRVEKKNWVERNSYSCSVVHEGLHNHHTTKSFSRTPGK

SEQ ID NO: 1522 - protein, 364 aa, synthetic construct
  REGION 1..364: note = Description of Artificial Sequence: Synthetic polypeptide
SPEVWVQVQMEATNLSSFSVHCGVLGYSLISLVTVSCEGFVDAGRTKLAVLHPEFGTQQWAPARQAHWETPNSVSVTLTMGQSKARSSLANTTFCCEFVTFPHGSRVACRDLHRSDPGLSAPTPALNLQADEPRGPTIKPSPPSKSPAPNLLGGPSVFIFPPKIKDVLMISLSPIVTCVVVDVSEDDPDVQISWFVNNVEVHTAQTQTHREDYNSTLRVVSALPIQHQDWMSGKEFKCKVNNKDLPAPIERTISKPKGSVRAPQVYVLPPPEEEMTKKQVTLTCMVTDFMPEDIYVEWTNNGKTELNYKNTEPVLDSDGSYFMYSKLRVEKKNWVERNSYSCSVVHEGLHNHHTTKSFSRTPGK

SEQ ID NO: 1523 - protein, 232 aa, Homo sapiens; identical to SEQ ID NO: 5

SEQ ID NO: 1524 - protein, 232 aa, synthetic construct
  REGION 1..232: note = Description of Artificial Sequence: Synthetic polypeptide
EPKSSDKTHTCPPCPAPELLGGPSVFLFPPKPKDTLMISRTPEVTCVVVDVSHEDPEVKFNWYVDGVEVHNAKTKPREEQYNSTYRVVSVLTVLHQDWLNGKEYKCKVSNKALPAPIEKTISKAKGQPREPQVYTLPPSRDELTKNQVSLTCLVKGFYPSDIAVEWESNGQPENNYKTTPPVLDSDGSFFLYSKLTVDKSRWQQGNVFSCSVMHEALHNHYTQKSLSLSPGK

SEQ ID NO: 1525 - protein, 232 aa, synthetic construct
  REGION 1..232: note = Description of Artificial Sequence: Synthetic polypeptide
EPKSSDKTHTCPPCPAPELLGGPSVFLFPPKPKDTLMISRTPEVTCVVVDVSHEDPEVKFNWYVDGVEVHNAKTKPREEQYASTYRVVSVLTVLHQDWLNGKEYKCKVSNKALPAPIEKTISKAKGQPREPQVYTLPPSRDELTKNQVSLTCLVKGFYPSDIAVEWESNGQPENNYKTTPPVLDSDGSFFLYSKLTVDKSRWQQGNVFSCSVMHEALHNHYTQKSLSLSPGK

SEQ ID NO: 1526 - protein, 217 aa, synthetic construct; identical to SEQ ID NO: 6
  REGION 1..217: note = Description of Artificial Sequence: Synthetic polypeptide

SEQ ID NO: 1527 - protein, 233 aa, Mus musculus; identical to SEQ ID NO: 7

SEQ ID NO: 1528 - protein, 233 aa, synthetic construct
  REGION 1..233: note = Description of Artificial Sequence: Synthetic polypeptide
EPRGPTIKPCPPCKCPAPNLLGGPSVFIFPPKIKDVLMISLSPIVTCVVVDVSEDDPDVQISWFVNNVEVHTAQTQTHREDYASTLRVVSALPIQHQDWMSGKEFKCKVNNKDLPAPIERTISKPKGSVRAPQVYVLPPPEEEMTKKQVTLTCMVTDFMPEDIYVEWTNNGKTELNYKNTEPVLDSDGSYFMYSKLRVEKKNWVERNSYSCSVVHEGLHNHHTTKSFSRTPGK

SEQ ID NO: 1529 - protein, 217 aa, synthetic construct
  REGION 1..217: note = Description of Artificial Sequence: Synthetic polypeptide
APNLLGGPSVFIFPPKIKDVLMISLSPIVTCVVVDVSEDDPDVQISWFVNNVEVHTAQTQTHREDYNSTLRVVSALPIQHQDWMSGKEFKCKVNNKDLPAPIERTISKPKGSVRAPQVYVLPPPEEEMTKKQVTLTCMVTDFMPEDIYVEWTNNGKTELNYKNTEPVLDSDGSYFMYSKLRVEKKNWVERNSYSCSVVHEGLHNHHTTKSFSRTPGK

SEQ ID NO: 1530 - protein, 232 aa, synthetic construct
  REGION 1..232: note = Description of Artificial Sequence: Synthetic polypeptide
EPKSSDKTHTSPPSPAPELLGGPSVFLFPPKPKDTLMISRTPEVTCVVVDVSHEDPEVKFNWYVDGVEVHNAKTKPREEQYNSTYRVVSVLTVLHQDWLNGKEYKCKVSNKALPAPIEKTISKAKGQPREPQVYTLPPSRDELTKNQVSLTCLVKGFYPSDIAVEWESNGQPENNYKTTPPVLDSDGSFFLYSKLTVDKSRWQQGNVFSCSVMHEALHNHYTQKSLSLSPGK

SEQ ID NO: 1531 - DNA, 20 bp, synthetic construct
  misc_feature 1..20: note = Description of Artificial Sequence: Synthetic primer
  source 1..20: mol_type = other DNA
ccaccaacctctcgtctttc

SEQ ID NO: 1532 - DNA, 18 bp, synthetic construct
  misc_feature 1..18: note = Description of Artificial Sequence: Synthetic primer
  source 1..18: mol_type = other DNA
tcatgccagagcatacag

SEQ ID NO: 1533 - DNA, 20 bp, synthetic construct
  misc_feature 1..20: note = Description of Artificial Sequence: Synthetic primer
  source 1..20: mol_type = other DNA
cagtgcctctaactgctgac

SEQ ID NO: 1534 - DNA, 22 bp, synthetic construct
  misc_feature 1..22: note = Description of Artificial Sequence: Synthetic primer
  source 1..22: mol_type = other DNA
tcactgttaccagggagatgag

SEQ ID NO: 1535 - DNA, 19 bp, synthetic construct
  misc_feature 1..19: note = Description of Artificial Sequence: Synthetic primer
  source 1..19: mol_type = other DNA
cacaggctgcccatgcaac

SEQ ID NO: 1536 - DNA, 20 bp, synthetic construct
  misc_feature 1..20: note = Description of Artificial Sequence: Synthetic primer
  source 1..20: mol_type = other DNA
tgcctgggtgctagtgagag

SEQ ID NO: 1537 - DNA, 20 bp, synthetic construct
  misc_feature 1..20: note = Description of Artificial Sequence: Synthetic primer
  source 1..20: mol_type = other DNA
ccaccaacctctcgtctttc

SEQ ID NO: 1538 - DNA, 20 bp, synthetic construct
  misc_feature 1..20: note = Description of Artificial Sequence: Synthetic primer
  source 1..20: mol_type = other DNA
gaccctgttacctgtcattg

SEQ ID NO: 1539 - protein, 314 aa, synthetic construct
  REGION 1..314: note = Description of Artificial Sequence: Synthetic polypeptide
MGHRTLVLPWVLLTLCVTAGTPEVWVQVRMEATELSSFTIRCGFLGSGSISLVTVSWGGPNGAGGTTLAVLHPERGIRQWAPARQARWETQSSISLILEGSGASSPCANTTFCCKFASFPEGSWEACGSLPPSSDPGLSAPPTPAPILRADLAGILGVSGVLLFGCVYLLHLLRRHKHRPAPRLQPSRTSPQAPRARAWAPSQASQAALHVPYATINTSCRPATLDTAHPHGGPSWWASLPTHAAHRPQGPAAWASTPIPARGSFVSVENGLYAQAGERPPHTGPGLTLFPDPRGPRAMEGPLGVRDYKDDDDK

SEQ ID NO: 1540 - protein, 242 aa, synthetic construct
  REGION 1..242: note = Description of Artificial Sequence: Synthetic polypeptide
MRTGNTQAAHATNMGQMQTLVLFSTLLTLCVSEADYKDDDDKSPEVWVQVQMEATNLSSFSVHCGVLGYSLISLVTVSCEGFVDAGRTKLAVLHPEFGTQQWAPARQAHWETPNSVSVTLTMGQSKARSSLANTTFCCEFVTFPHGSRVACRDLHRSDPGLSAPTPALNLQADLVRILGTSGVFLFGFIFILCLRWQQRHWCLSKSQPSLTSTQAQVETQPPHLASTHSSFISMENGLYALA

SEQ ID NO: 1541 - protein, 218 aa, synthetic construct
  REGION 1..218: note = Description of Artificial Sequence: Synthetic polypeptide
MQTLVLFSTLLTLCVSEASPEVWVQVQMEATNLSSFSVHCGVLGYSLISLVTVSCEGFVDAGRTKLAVLHPEFGTQQWAPARQAHWETPNSVSVTLTMGQSKARSSLANTTFCCEFVTFPHGSRVACRDLHRSDPGLSAPTPALNLQADLVRILGTSGVFLFGFIFILCLRWQQRHWCLSKSQPSLTSTQAQVETQPPHLASTHSSFISMENGLYALA

SEQ ID NO: 1542 - protein, 226 aa, synthetic construct
  REGION 1..226: note = Description of Artificial Sequence: Synthetic polypeptide
MQTLVLFSTLLTLCVSEADYKDDDDKSPEVWVQVQMEATNLSSFSVHCGVLGYSLISLVTVSCEGFVDAGRTKLAVLHPEFGTQQWAPARQAHWETPNSVSVTLTMGQSKARSSLANTTFCCEFVTFPHGSRVACRDLHRSDPGLSAPTPALNLQADLVRILGTSGVFLFGFIFILCLRWQQRHWCLSKSQPSLTSTQAQVETQPPHLASTHSSFISMENGLYALA

SEQ ID NO: 1543 - DNA, 20 bp, synthetic construct
  misc_feature 1..20: note = Description of Artificial Sequence: Synthetic primer
  source 1..20: mol_type = other DNA
cttgtgttcaccacctctgg

SEQ ID NO: 1544 - DNA, 20 bp, synthetic construct
  misc_feature 1..20: note = Description of Artificial Sequence: Synthetic primer
  source 1..20: mol_type = other DNA
tgttctcatcgcaggaggtc

SEQ ID NO: 1545 - DNA, 20 bp, synthetic construct
  misc_feature 1..20: note = Description of Artificial Sequence: Synthetic primer
  source 1..20: mol_type = other DNA
ttggctgtggatacctcctt

SEQ ID NO: 1546 - DNA, 20 bp, synthetic construct
  misc_feature 1..20: note = Description of Artificial Sequence: Synthetic primer
  source 1..20: mol_type = other DNA
ataagggtcgtggagagcag

SEQ ID NO: 1547 - DNA, 20 bp, synthetic construct
  misc_feature 1..20: note = Description of Artificial Sequence: Synthetic primer
  source 1..20: mol_type = other DNA
ccaccaacctctcgtctttc

SEQ ID NO: 1548 - DNA, 18 bp, synthetic construct
  misc_feature 1..18: note = Description of Artificial Sequence: Synthetic primer
  source 1..18: mol_type = other DNA
tcatgccagagcatacag

SEQ ID NO: 1549 - DNA, 20 bp, synthetic construct
  misc_feature 1..20: note = Description of Artificial Sequence: Synthetic primer
  source 1..20: mol_type = other DNA
cagtgcctctaactgctgac

SEQ ID NO: 1550 - DNA, 22 bp, synthetic construct
  misc_feature 1..22: note = Description of Artificial Sequence: Synthetic primer
  source 1..22: mol_type = other DNA
tcactgttaccagggagatgag

SEQ ID NO: 1551 - DNA, 19 bp, synthetic construct
  misc_feature 1..19: note = Description of Artificial Sequence: Synthetic primer
  source 1..19: mol_type = other DNA
cacaggctgcccatgcaac

SEQ ID NO: 1552 - DNA, 20 bp, synthetic construct
  misc_feature 1..20: note = Description of Artificial Sequence: Synthetic primer
  source 1..20: mol_type = other DNA
tgcctgggtgctagtgagag

SEQ ID NO: 1553 - DNA, 20 bp, synthetic construct
  misc_feature 1..20: note = Description of Artificial Sequence: Synthetic primer
  source 1..20: mol_type = other DNA
ccaccaacctctcgtctttc

SEQ ID NO: 1554 - DNA, 20 bp, synthetic construct
  misc_feature 1..20: note = Description of Artificial Sequence: Synthetic primer
  source 1..20: mol_type = other DNA
gaccctgttacctgtcattg

SEQ ID NO: 1555 - protein, 8 aa, synthetic construct
  REGION 1..8: note = Description of Artificial Sequence: Synthetic peptide
DYKDDDDK

SEQ ID NO: 1556 - protein, 6 aa, synthetic construct
  REGION 1..6: note = Description of Artificial Sequence: Synthetic 6xHis tag
HHHHHH

SEQ ID NO: 1557 - protein, 326 aa, synthetic construct
  REGION 1..326: note = Description of Artificial Sequence: Synthetic polypeptide
MRTEAQVPALQPPEPGLEGAMGHRTLVLPWVLLTLCVTAGTPEVWVQVRMEATELSSFTIRCGFLGSGSISLVTVSWGGPNGAGGTTLAVLHPERGIRQWAPARQARWETQSSISLILEGSGASSPCANTTFCCKFASFPEGSWEACGSLPPSSDPGLSAPPTPAPILRADLAGILGVSGVLLFGCVYLLHLLRRHKHRPAPRLQPSRTSPQAPRARAWAPSQASQAALHVPYATINTSCRPATLDTAHPHGGPSWWASLPTHAAHRPQGPAAWASTPIPARGSFVSVENGLYAQAGERPPHTGPGLTLFPDPRGPRAMEGPLGVR

SEQ ID NO: 1558 - protein, 326 aa, synthetic construct
  REGION 1..326: note = Description of Artificial Sequence: Synthetic polypeptide
MRTEAQVPALQPPEPGLEGAMGHRTLVLPWVLLTLCVTAGTPEVWVQVRMEATELSSFTIRCGFLGSGSISLVTVSWGGPDGAGGTTLAVLHPERGIRQWAPARQARWETQSSISLILEGSGASSPCANTTFCCKFASFPEGSWEACGSLPPSSDPGLSAPPTPAPILRADLAGILGVSGVLLFGCVYLLHLLRRHKHRPAPRLQPSRTSPQAPRARAWAPSQASQAALHVPYATINTSCRPATLDTAHPHGGPSWWASLPTHAAHRPQGPAAWASTPIPARGSFVSVENGLYAQAGERPPHTGPGLTLFPDPRGPRAMEGPLGVR

SEQ ID NO: 1559 - protein, 199 aa, synthetic construct
  REGION 1..199: note = Description of Artificial Sequence: Synthetic polypeptide
MRTEAQVPALQPPEPGLEGAMGHRTLVLPWVLLTLCVTAGTPEVWVQVRMEATELSSFTIRCGFLGSGSISLVTVSWGGPDGAGGTTLAVLHPERGIRQWAPARQARWETQSSISLILEGSGASSPCANTTFCCKFASFPEGSWEACGSLPPSSDPGLSAPPTPAPILRADLAGILGVSGVLLFGCVYLLHLLRRHKHR

SEQ ID NO: 1560 - protein, 211 aa, synthetic construct
  REGION 1..211: note = Description of Artificial Sequence: Synthetic polypeptide
MRTEAQVPALQPPEPGLEGAMGHRTLVLPWVLLTLCVTAGTPEVWVQVRMEATELSSFTIRCGFLGSGSISLVTVSWGGPDGAGGTTLAVLHPERGIRQWAPARQARWETQSSISLILEGSGASSPCANTTFCCKFASFPEGSWEACGSLPPSSDPGLSVPPTPAPILRADLAGILGVSGVLLFDCGYLLHLLCRQKHRPAPRLQPSHTSS

SEQ ID NO: 1561 - protein, 231 aa, synthetic construct
  REGION 1..231: note = Description of Artificial Sequence: Synthetic polypeptide
MRTEAQVPALQPPEPGLEGAMGHRTLVLPWVLLTLCVTAGTPEVWVQVRMEATELSSFTIRWLSAPPTPAPILRADLAGILGVSGVLLFGCVYLLHLLRRHKHRPAPRLQPSRTSPQAPRARAWAPSQASQAALHVPYATINTSCRPATLDTAHPHGGPSWWASLPTHAAHRPQGPAAWASTPIPARGSFVSVENGLYAQAGERPPHTGPGLTLFPDPRGPRAMEGPLGVR

SEQ ID NO: 1562 - protein, 209 aa, synthetic construct
  REGION 1..209: note = Description of Artificial Sequence: Synthetic polypeptide
MRTEAQVPALQPPEPGLEGAMGHRTLVLPWVLLTLCVTAGLSAPPTPAPILRADLAGILGVSGVLLFGCVYLLHLLRRHKHRPAPRLQPSRTSPQAPRARAWAPSQASQAALHVPYATINTSCRPATLDTAHPHGGPSWWASLPTHAAHRPQGPAAWASTPIPARGSFVSVENGLYAQAGERPPHTGPGLTLFPDPRGPRAMEGPLGVR

SEQ ID NO: 1563 - protein, 94 aa, synthetic construct
  REGION 1..94: note = Description of Artificial Sequence: Synthetic polypeptide
MRTEAQVPALQPPEPGLEGAMGHRTLVLPWVLLTLCVTAGLSVPPTPAPILRADLAGILGVSGVLLFDCGYLLHLLCRQKHRPAPRLQPSHTSS

SEQ ID NO: 1564 - protein, 223 aa, synthetic construct
  REGION 1..223: note = Description of Artificial Sequence: Synthetic polypeptide
MRTEAQVPALQPPEPGLEGAMGHRTLVLPWVLLTLCVTAGTPEVWVQVRMEATELSSFTIRCGFLGSGSISLVTVSWGGPDGAGGTTLAVLHPERGIRQWAPARQARWETQSSISLILEGSGASSPCANTTFCCKFASFPEGSWEACGSLPPSSDPGGAGARGPGGQGGARELATHLILVSVPRALCPADSCPHSAGRPGRDLGGLRSPPLWLCLPPSSAAPT

SEQ ID NO: 1565 - protein, 250 aa, synthetic construct
  REGION 1..250: note = Description of Artificial Sequence: Synthetic polypeptide
MRTEAQVPALQPPEPGLEGAMGHRTLVLPWVLLTLCVTAGTPEVWVQVRMEATELSSFTIRCGFLGSGSISLVTVSWGGPDGAGGTTLAVLHPERGAQISPRGPKIGGPPCPRPGPAGKPRAASLSSWKALGPAAPAPTPPSAASLRPSQAALHVPYATINTSCRPATLDTAHPHGGPSWWASLPTHAAHRPQGPAAWASTPIPARGSFVSVENGLYAQAGERPPHTGPGLTLFPDPRGPRAMEGPLGVR

SEQ ID NO: 1566 - protein, 202 aa, synthetic construct
  REGION 1..202: note = Description of Artificial Sequence: Synthetic polypeptide
MRTEAQVPALQPPEPGLEGAMGHRTLVLPWVLLTLCVTAGTPEVWVQVRMEATELSSFTIRCGFLGSGSISLVTVSWGGPDGAGGTTLAVLHPERGIRQWAPARQARWETQSSISLILEGSGASSPCANTTFCCKFASFPGCSSRPLCHYQHQLPPSYFGHSSPPWGAVLVGVTPHPRCTPAPGPCRLGLHTHPCTWQLCLC

SEQ ID NO: 1567 - skipped

SEQ ID NO: 1568 - protein, 4 aa, synthetic construct
  REGION 1..4: note = Description of Artificial Sequence: Synthetic peptide
GSGS

SEQ ID NO: 1569 - skipped

SEQ ID NO: 1570 - protein, 4 aa, synthetic construct
  REGION 1..4: note = Description of Artificial Sequence: Synthetic peptide
GGGS

SEQ ID NO: 1571 - protein, 5 aa, synthetic construct
  REGION 1..5: note = Description of Artificial Sequence: Synthetic peptide
GGGGS

SEQ ID NO: 1572 - protein, 10 aa, synthetic construct
  REGION 1..10: note = Description of Artificial Sequence: Synthetic peptide
GGGGSGGGGS

SEQ ID NO: 1573 - protein, 15 aa, synthetic construct
  REGION 1..15: note = Description of Artificial Sequence: Synthetic peptide
GGGGSGGGGSGGGGS

SEQ ID NO: 1574 - protein, 20 aa, synthetic construct
  REGION 1..20: note = Description of Artificial Sequence: Synthetic peptide
GGGGSGGGGSGGGGSGGGGS

SEQ ID NO: 1575 - protein, 12 aa, synthetic construct
  REGION 1..12: note = Description of Artificial Sequence: Synthetic peptide
AGAAAKGAAAKA

SEQ ID NO: 1576 - protein, 17 aa, synthetic construct
  REGION 1..17: note = Description of Artificial Sequence: Synthetic peptide
AGAAAKGAAAKGAAAKA

SEQ ID NO: 1577 - protein, 22 aa, synthetic construct
  REGION 1..22: note = Description of Artificial Sequence: Synthetic peptide
AGAAAKGAAAKGAAAKGAAAKA

SEQ ID NO: 1578 - protein, 27 aa, synthetic construct
  REGION 1..27: note = Description of Artificial Sequence: Synthetic peptide
AGAAAKGAAAKGAAAKGAAAKGAAAKA

SEQ ID NO: 1579 - protein, 7 aa, synthetic construct
  REGION 1..7: note = Description of Artificial Sequence: Synthetic peptide
AGAAAKA

SEQ ID NO: 1580 - protein, 11 aa, synthetic construct
  REGION 1..11: note = Description of Artificial Sequence: Synthetic peptide
GSENLYFQGSG

SEQ ID NO: 1581 - protein, 12 aa, synthetic construct
  REGION 1..12: note = Description of Artificial Sequence: Synthetic peptide
AEAAAKEAAAKA

SEQ ID NO: 1582 - protein, 22 aa, synthetic construct
  REGION 1..22: note = Description of Artificial Sequence: Synthetic peptide
AEAAAKEAAAKEAAAKEAAAKA

SEQ ID NO: 1583 - protein, 14 aa, synthetic construct
  REGION 1..14: note = Description of Artificial Sequence: Synthetic peptide
GGEAAAKEAAAKGG

SEQ ID NO: 1584 - protein, 19 aa, synthetic construct
  REGION 1..19: note = Description of Artificial Sequence: Synthetic peptide
GGGGSGGGGSGAGSGGGGS

SEQ ID NO: 1585 - protein, 11 aa, synthetic construct
  REGION 1..11: note = Description of Artificial Sequence: Synthetic peptide
GGGGGSGGGGS

SEQ ID NO: 1586 - protein, 6 aa, synthetic construct
  REGION 1..6: note = Description of Artificial Sequence: Synthetic peptide
GGGGSG

SEQ ID NO: 1587 - protein, 4 aa, synthetic construct
  REGION 1..4: note = Description of Artificial Sequence: Synthetic peptide
GSGG

SEQ ID NO: 1588 - protein, 5 aa, synthetic construct
  REGION 1..5: note = Description of Artificial Sequence: Synthetic peptide
GSGGS

SEQ ID NO: 1589 - protein, 326 aa, synthetic construct; identical to SEQ ID NO: 1557
  REGION 1..326: note = NCBI Reference Sequence: NP 076975

1. A method of screening for inhibitors of the binding association of PVRIG polypeptide with PVLR2, said method comprising:
a) providing a surface comprising a first ligand protein comprising one of PVRIG polypeptide or PVLR2 polypeptide;
b) contacting said surface with a candidate agent under physiological conditions, wherein if said candidate agent binds to said first ligand protein it forms a first binding complex,
c) contacting said surface with a second ligand protein comprising the other of PVRIG polypeptide or PVLR2; and
d) determining whether said PVRIG polypeptide and said PVLR2 are bound as an indication of whether said candidate agent inhibits said binding association.

2. A method of screening for inhibitors of the binding association of PVRIG polypeptide with PVLR2, said method comprising:
a) providing a cell comprising an exogeneous recombinant nucleic acid encoding a human PVRIG polypeptide, wherein said cell expresses said human PVRIG polypeptide;
b) contacting said cell with a candidate agent and a labeled PVRL2 polypeptide;
c) determining whether said PVRIG polypeptide binds to PVLR2 as an indication of whether said candidate agent inhibits the binding of PVRIG polypeptide with PVLR2.

3. A method of screening for inhibitors of the binding association of PVRIG polypeptide with PVLR2, said method comprising:
a) providing a cell comprising an exogeneous recombinant nucleic acid encoding a human PVLR2 polypeptide, wherein said cell expresses said human PVLR2 polypeptide;
b) contacting said cell with a candidate agent and a labeled PVRIG polypeptide;
c) determining whether said PVLR2 polypeptide binds to PVRIG as an indication of whether said candidate agent inhibits the binding of PVRIG polypeptide with PVLR2.

4. A method of screening for inhibitors of the binding association of PVRIG polypeptide with PVLR2, said method comprising:
a) providing a test solution comprising:
i) a PVRIG polypeptide comprising a first FRET label;
ii) a PVLR2 polypeptide comprising a second FRET label;
c) providing a candidate agent;
d) detecting a FRET signal between said first and second label, wherein a difference in said FRET signal in the presence or absence of said candidate agent indicates that the candidate agent inhibits said binding association.

5. A method according to any of claims wherein a plurality of candidate agents are tested.

6. A method according to any of claims 1 to 5 wherein said candidate agent is a protein.

7. A method according to claim 6 wherein said protein is an anti-PVRIG antibody.

8. A method according to claim 6 wherein said protein comprises an extracellular domain (ECD) of PVRIG.

9. A method according to claim 8 wherein said protein is a fusion protein comprising said ECD and a fusion partner.

10. A method according to claim 9 wherein said fusion partner is selected from the group consisting of a human IgG Fc domain and a human serum albumin (HSA).

11. A method according to any of claims 1 to 10 wherein said method further comprises:
a) contacting said candidate agent with a population of cytotoxic T cells (CTLs) under conditions wherein said CTLs would normally be activated; and
b) determining the effect of said agent on said activation.

12. A method according to any of claims 1 to 10 wherein said method further comprises:
a) contacting said candidate agent with a population of cytotoxic T cells (CTLs); and b) determining the effect of said agent on IFNγ production.

13. A method according to any of claims 1 to 10 wherein said method further comprises:
a) contacting said candidate agent with a population of γδ T cells under conditions wherein said γδ T cells would normally be activated; and
b) determining the effect of said agent on said activation.

14. A method according to any of claims 1 to 10 wherein said method further comprises:
a) contacting said candidate agent with a population of Th1 cells under conditions wherein said Th1 cells would normally be activated; and
b) determining the effect of said agent on said activation.

15. A method according to any of claims 1 to 10 wherein said method further comprises:
a) contacting said candidate agent with a population of regulatory T cells (Tregs) under conditions and determining the effect of said agent on Treg cell number or activity.

16. A method according to claims 11 to 15 wherein said determination is done by measuring the presence or absence of increased expression of a protein selected from the group consisting of IFNg, TNFα, GM-CSF, CD25, CD137, CD69, PD1, CD107A, HLA-DR, IL-2, IL-6, IL-4, IL-5, IL-10 and IL-13, wherein increased expression is an indication of activation.

17. A method of treating a disorder associated with the interaction of PVRIG and PVLR2 comprising administering to a patient a composition comprising a stimulator of PVRIG to effect treatment.

18. A method according to claim 17 wherein said treatment is a decrease in immune response.

19. A method according to claim 17 wherein said treatment is a decrease in activation of αβ and/or γδ T cells.

20. A method according to claim 17 wherein said treatment is a decrease in cytotoxic T cell activity

21. A method according to claim 17 wherein said treatment is a decrease in NK and/or NKT cell activity.

22. A method according to claim 17 wherein said treatment is a decrease of αβ and/or γδ T-cell activity.

23. A method according to claim 17 wherein said treatment is a decrease in pro-inflammatory cytokine secretion

24. A method according to claim 17 wherein said treatment is a decrease in IL-2 secretion.

25. A method according to claim 17 wherein said treatment is a decrease in interferon- [symbol] production.

26. A method according to claim 17 wherein said treatment is a decrease in Th1 response.

27. A method according to claim 17 wherein said treatment is a increase in Th2 response.

28. A method according to claim 17 wherein said treatment is an increase in inhibition of T cell activity.

29. A method according to claim 17 wherein said treatment is an increase in inhibition of CTL activity.

30. A method according to claim 17 wherein said treatment is an increase in inhibition of NK cell activity.

31. A method according to claim 17 wherein said treatment is an increase in αβ and/or γδ T cell exhaustion.

32. A method according to claim 17 wherein said treatment is a decrease in αβ and/or γδ T cell response.

33. A method according to claim 17 wherein said treatment is a decrease in activity of cytotoxic cells.

34. A method according to claim 17 wherein said treatment is a reduction in antigen-specific memory responses.

35. A method according to claim 17 wherein said treatment is an inhibition of apoptosis or lysis of cells.

36. A method according to claim 17 wherein said treatment is a decrease in cytotoxic or cytostatic effect on cells.

37. A method according to claim 17 wherein said treatment is a reduction in direct killing of cells.

38. A method according to claim 17 wherein said treatment is a decreases in Th17 activity.

39. A method according to claim 17 wherein said treatment is an reduction of complement dependent cytotoxicity and/or antibody dependent cell-mediated cytotoxicity.

40. A method according to any of claims 17 to 38 wherein said stimulator is selected from the group consisting of a protein and a nucleic acid.

41. A method according to claim 40 wherein said protein comprises an extracellular domain (ECD) of PVRIG.

42. A method according to claim 40 wherein said protein is a fusion protein comprising said ECD and a fusion partner.

43. A method according to claim 42 wherein said fusion partner is selected from the group consisting of a human IgG Fc domain and a human serum albumin (HSA).

44. A method according to any of claims 17 to 43 wherein said patient has an immune disorder.

45. A method according to 44 wherein said wherein said immune disorder is selected from the group consisting of an autoimmune disease, organ transplant rejection and inflammation.

46. A method according to claim 45 wherein said autoimmune disease is selected from the group consisting of rheumatoid arthritis, lupus, Inflammatory bowel disease, psoriasis, multiple sclerosis and diabetes type I.

47. A composition comprising an isolated PVRIG polypeptide consisting of a PVRIG polypeptide ECD domain having at least 95% identity to the ECD domain of an amino acid sequence selected from the group consisting of the sequences depicted in FIG. 67, FIG. 91 and FIGS. 92A to 92AT.

48. A composition according to claim 47 wherein said isolated PVRIG polypeptide has at least 99% identity to an amino acid sequence selected from the group consisting of the sequences depicted in FIG. 67, FIG. 91 and FIGS. 92A to 92AT.

49. A composition according to claim 47 wherein said isolated PVRIG polypeptide is selected from the group consisting of the sequences depicted in FIG. 67, FIG. 91 and FIGS. 92A to 92AT.

50. A composition comprising a PVRIG fusion polypeptide comprising:
a) an ECD from a PVRIG polypeptide; and
b) a covalently attached fusion partner moiety.

51. A composition according to claim 50 wherein said fusion partner moiety is selected from the group consisting of a human IgG Fc domain, a human serum albumin (HSA) and a polyethylene glycol (PEG).

52. A composition according to claim 50 wherein said ECD has an amino acid sequence selected from the group consisting of the sequences depicted in FIG. 67, FIG. 91 and FIGS. 92A to 92AT.

53. A composition according to claims 50 to 52 wherein said PVRIG polypeptide and said fusion partner moiety are directly covalently attached.

54. A composition according to claim 53 wherein said fusion partner moiety is a polyethylene glycol (PEG) moiety.

55. A composition according to claims 50 to 52 wherein said PVRIG polypeptide and said fusion partner moiety are covalently attached using an exogeneous linker.

56. A composition according to claim 55 wherein said exogeneous linker is selected from the group consisting of those depicted in FIG. 93.

57. A composition according to claim 55 or 56 wherein said exogenous linker has the formula (GGGS)n, wherein n is from 1 to 5.

58. A composition according to any of claims 50 to 53 and 55 to 57 wherein said fusion partner moiety is a human serum albumin (HSA).

59. A composition according to any of claims 50 to 53 and 55 to 57 wherein said fusion partner moiety is an Fc domain.

60. A composition according to claim 59 wherein said Fc domain is a human IgG Fc domain.

61. A composition according to claim 60 wherein said human IgG Fc domain is selected from the group consisting of the Fc domain of human IgG1, the Fc domain of human IgG2, the Fc domain of human IgG3 and the Fc domain of human IgG4.

62. A composition according to claim 59 wherein said Fc domain is a variant human Fc domain from IgG1 or IgG2.

63. A composition according to any of claims 50 to 62 further comprising a pharmaceutically acceptable carrier.

64. A method of suppressing T cell activation of a patient comprising administering a composition according to any of claims 50 to 63 to said patient such that said patient's immune response is suppressed as a result of treatment.

65. A method according to claim 64 wherein said patient has an immune disorder.

66. A method according to claim 65 wherein said immune disorder is selected from the group consisting of an autoimmune disease, and organ transplant rejection.

67. A method according to claim 66 wherein said autoimmune disease is selected from the group consisting of rheumatoid arthritis, lupus, Inflammatory bowel disease, psoriasis, multiple sclerosis, Diabetes type I.
